(19) United States
(12) Patent Application Publication
(10) Pub. No.: US 2018/0363030 A1
(43) Pub. Date: Dec. 20, 2018

(54) GENETIC TESTING FOR PREDICTING RESISTANCE OF ENTEROBACTER SPECIES AGAINST ANTIMICROBIAL AGENTS

(71) Applicant: Ares Genetics GmbH, Vienna (AT)

(72) Inventors: Andreas Keller, Puttlingen (DE); Susanne Schmolke, Erlangen (DE); Cord Friedrich Stahler, Hirschberg an der Bergstrasse (DE); Christina Backes, Saarbrucken (DE); Valentina Galata, Saarbrucken (DE)

(73) Assignee: Ares Genetics GmbH, Vienna (AT)

(21) Appl. No.: 15/747,046

(22) PCT Filed: Jul. 25, 2016
(86) PCT No.: PCT/EP2016/067610

§ 371 Date: Jan. 23, 2018

(30) Foreign Application Priority Data
Jul. 29, 2015 (EP) PCT/EP2015/067382

(51) Int. Cl. C12Q 1/689; G06F 19/18; G06F 19/22

(52) U.S. Cl. CPC C12Q 1/689; C12Q 1/6869; G06F 19/22; G06F 19/18

(57) ABSTRACT

The invention relates to a method of determining an infection of a patient with Enterobacter species potentially resistant to antimicrobial drug treatment, a method of selecting a treatment of a patient suffering from an antibiotic resistant Enterobacter infection, and a method of determining an antibiotic resistance profile for bacterial microorganisms of Enterobacter species, as well as computer program products used in these methods. In an exemplary method, a sample (1), is used for molecular testing (2), and then a molecular fingerprint (3) is taken. The result is then compared to a reference library (4), and the result (5) is reported.

[0001] The present invention relates to a method of determining an infection of a patient with Enterobacter species potentially resistant to antimicrobial drug treatment, a method of selecting a treatment of a patient suffering from an infection with a potentially resistant Enterobacter strain, and a method of determining an antimicrobial drug, e.g. antibiotic, resistance profile for bacterial microorganisms of Enterobacter species, as well as computer program products used in these methods.

[0002] Antibiotic resistance is a form of drug resistance whereby a sub-population of a microorganism, e.g. a strain of a bacterial species, can survive and multiply despite exposure to an antibiotic drug. It is a serious and health concern for the individual patient as well as a major public health issue.

[0003] Timely treatment of a bacterial infection requires the analysis of clinical isolates obtained from patients with regard to antibiotic resistance, in order to select an efficacious therapy. Generally, for this purpose an association of the identified resistance with a certain microorganism (i.e. ID) is necessary.

[0004] Antibacterial drug resistance (ADR) represents a major health burden. According to the World Health Organization's antimicrobial resistance global report on surveillance, ADR leads to 25,000 deaths per year in Europe and 23,000 deaths per year in the US. In Europe, 2.5 million extra hospital days lead to societal cost of 1.5 billion euro. In the US, the direct cost of 2 million illnesses leads to 20 billion dollar direct cost. The overall cost is estimated to be substantially higher, reducing the gross domestic product (GDP) by up to 1.6%.

[0005] Enterobacter ssp. is a genus of common gram-negative, facultatively anaerobic, rod-shaped, non-spore-forming bacteria of the family Enterobacteriaceae. Enterobacter spp. are ubiquitous in nature, their presence in the intestinal tracts of animals results in their wide distribution in soil, water, and sewage.

[0006] In humans, multiple Enterobacter species are known to act as opportunistic pathogens. Pathogenic Enterobacter can cause any of a variety of conditions, including eye and skin infections, meningitis, bacteremia (bacterial blood infection), pneumonia, and urinary tract infections. Illness caused by E. cloacae or by E. aerogenes is associated mainly with exposure to the organisms in nosocomial settings, such as hospitals or nursing homes. The emergence of drug-resistant Enterobacter organisms has complicated treatment regimens, particularly within nosocomial settings, where such organisms have become increasingly common. According to the report on antimicrobial-resistant pathogens associated with healthcare-associated infections (2006-2007) of the National Healthcare Safety Network (NHSN) Enterobacter species are among the 10 most common pathogens and account for 5% (overall rank 8) of healthcare associated infections (HAIs), and for ventilator-associated pneumonia Enterobacter spp. rank even as third most common pathogen.

[0007] Enterobacter cloacae tends to contaminate various medical, intravenous and other hospital devices. In recent years, Enterobacter cloacae has emerged as one of the most commonly found nosocomial pathogen in neonatal units, with several outbreaks of infection being reported.

[0008] Enterobacter aerogenes—as well as other enteric bacteria, is well known for its ability to acquire resistance to antibiotics used against enterobacterial infections. This occurs through the activation or inactivation of chromosomal genes or through the horizontal acquisition of new genes and is generally associated with the use of antibiotics. Previously susceptible Enterobacter strains can acquire or develop a resistant phenotype in less than a week. There has been some success in dealing with infections through antibiotics; however, the fast development of multidrug resistance has become an increasingly growing problem. These multiresistant strains have caused outbreaks in intensive care units (ICUs) in Belgium, France, Austria, and the United States.

[0009] In general the mechanisms for resistance of bacteria against antimicrobial treatments rely to a very substantial part on the organism's genetics. The respective genes or molecular mechanisms are either encoded in the genome of the bacteria or on plasmids that can be interchanged between different bacteria. The most common resistance mechanisms include:
[0010] 1) Efflux pumps are high-affinity reverse transport systems located in the membrane that transports the antibiotic out of the cell, e.g. resistance to tetracycline.
[0011] 2) Specific enzymes modify the antibiotic in a way that it loses its activity. In the case of streptomycin, the antibiotic is chemically modified so that it will no longer bind to the ribosome to block protein synthesis.
[0012] 3) An enzyme is produced that degrades the antibiotic, thereby inactivating it. For example, the penicillinases are a group of beta-lactamase enzymes that cleave the beta lactam ring of the penicillin molecule.

[0013] In addition, some pathogens show natural resistance against drugs. For example, an organism can lack a transport system for an antibiotic or the target of the antibiotic molecule is not present in the organism.

[0014] Pathogens that are in principle susceptible to drugs can become resistant by modification of existing genetic material (e.g. spontaneous mutations for antibiotic resistance, happening in a frequency of one in about 100 mio bacteria in an infection) or the acquisition of new genetic material from another source. One example is horizontal gene transfer, a process where genetic material contained in small packets of DNA can be transferred between individual bacteria of the same species or even between different species. Horizontal gene transfer may happen by transduction, transformation or conjugation.

[0015] Generally, testing for susceptibility/resistance to antimicrobial agents is performed by culturing organisms in different concentration of these agents.

[0016] In brief, agar plates are inoculated with patient sample (e.g. urine, sputum, blood, stool) overnight. On the next day individual colonies are used for identification of organisms, either by culturing or using mass spectroscopy. Based on the identity of organisms new plates containing increasing concentration of drugs used for the treatment of these organisms are inoculated and grown for additional 12-24 hours. The lowest drug concentration which inhibits growth (minimal inhibitory concentration—MIC) is used to determine susceptibility/resistance for tested drugs. The process takes at least 2 to 3 working days during which the patient is treated empirically. A significant reduction of time-to-result is needed especially in patients with life-threatening disease and to overcome the widespread misuse of antibiotics.

[0017] Recent developments include PCR based test kits for fast bacterial identification (e.g. Biomerieux Biofire Tests, Curetis Unyvero Tests). With these test the detection of selected resistance loci is possible for a very limited number of drugs, but no correlation to culture based AST is given. Mass spectroscopy is increasingly used for identification of pathogens in clinical samples (e.g. Bruker Biotyper), and research is ongoing to establish methods for the detection of susceptibility/resistance against antibiotics.

[0018] For some drugs such it is known that at least two targets are addressed, e.g. in case of Ciprofloxacin (drug bank ID 00537; http://www.drugbank.ca/drugs/DB00537) targets include DNA Topoisomerase IV, DNA Topoisomerase II and DNA Gyrase. It can be expected that this is also the case for other drugs although the respective secondary targets have not been identified yet. In case of a common regulation, both relevant genetic sites would naturally show a co-correlation or redundancy.

[0019] It is known that drug resistance can be associated with genetic polymorphisms. This holds for viruses, where resistance testing is established clinical practice (e.g. HIV genotyping). More recently, it has been shown that resistance has also genetic causes in bacteria and even higher organisms, such as humans where tumors resistance against certain cytostatic agents can be linked to genomic mutations.

[0020] Wozniak et al. (BMC Genomics 2012, 13(Suppl 7):S23) disclose genetic determinants of drug resistance in Staphylococcus aureus based on genotype and phenotype data. Stoesser et al. disclose prediction of antimicrobial susceptibilities for Escherichia coli and Klebsiella pneumoniae isolates using whole genomic sequence data (J Antimicrob Chemother 2013; 68: 2234-2244).

[0021] Chewapreecha et al (Chewapreecha et al (2014) Comprehensive Identification of single nucleotid polymorphisms associated with beta-lactam resistance within pneumococcal mosaic genes. PLoS Genet 10(8): e1004547) used a comparable approach to identify mutations in gram-positive Streptococcus Pneumonia.

[0022] The fast and accurate detection of infections with Enterobacter species and the prediction of response to antimicrobial therapy represent a high unmet clinical need.

[0023] This need is addressed by the present invention.

### SUMMARY OF THE INVENTION

[0024] The present inventors addressed this need by carrying out whole genome sequencing of a large cohort of Enterobacter clinical isolates and comparing the genetic mutation profile to classical culture based antimicrobial susceptibility testing with the goal to develop a test which can be used to detect bacterial susceptibility/resistance against antimicrobial drugs using molecular testing.

[0025] The inventors performed extensive studies on the genome of bacteria of Enterobacter species either susceptible or resistant to antimicrobial, e.g. antibiotic, drugs. Based on this information, it is now possible to provide a detailed analysis on the resistance pattern of Enterobacter strains based on individual genes or mutations on a nucleotide level. This analysis involves the identification of a resistance against individual antimicrobial, e.g. antibiotic, drugs as well as clusters of them. This allows not only for the determination of a resistance to a single antimicrobial, e.g. antibiotic, drug, but also to groups of antimicrobial drugs, e.g. antibiotics such as lactam or quinolone antibiotics, or even to all relevant antibiotic drugs.

[0026] Therefore, the present invention will considerably facilitate the selection of an appropriate antimicrobial, e.g. antibiotic, drug for the treatment of an Enterobacter infection in a patient and thus will largely improve the quality of diagnosis and treatment.

[0027] According to a first aspect, the present invention discloses a diagnostic method of determining an infection of a patient with Enterobacter species potentially resistant to antimicrobial drug treatment, which can be also described as a method of determining an antimicrobial drug, e.g. antibiotic, resistant Enterobacter infection of a patient, comprising the steps of:

a) obtaining or providing a sample containing or suspected of containing at least one Enterobacter species from the patient;
b) determining the presence of at least one mutation in at least two genes from the group of genes listed in Table 1a and/or Table 1b, or Table 2a and/or Table 2b below, wherein the presence of said at least two mutations is indicative of an infection with an antimicrobial drug resistant, e.g. antibiotic resistant, Enterobacter strain in said patient.

[0028] An infection of a patient with Enterobacter species potentially resistant to antimicrobial drug treatment herein means an infection of a patient with Enterobacter species wherein it is unclear if the Enterobacter species is susceptible to treatment with a specific antimicrobial drug or if it is resistant to the antimicrobial drug.

TABLE 1a
List of genes, particularly for Enterobacter
aerogenes

| | | | | |
|---|---|---|---|---|
| ST548_p8085 | ST548_p3778 | ST548_p5387 | ST548_p7737 | ST548_p7940 |
| ST548_p7919 | ST548_p7543 | ST548_p7426 | ST548_p7336 | ST548_p7239 |
| ST548_p6918 | ST548_p6844 | ST548_p6794 | ST548_p6618 | ST548_p6494 |
| ST548_p6478 | ST548_p6451 | ST548_p6386 | ST548_p6367 | ST548_p6066 |
| ST548_p5966 | ST548_p5904 | ST548_p5779 | ST548_p5658 | ST548_p5474 |
| ST548_p5447 | ST548_p5300 | ST548_p5259 | ST548_p5115 | ST548_p5081 |
| ST548_p4891 | ST548_p4836 | ST548_p4577 | ST548_p4310 | ST548_p4203 |
| ST548_p4107 | ST548_p3593 | ST548_p3452 | ST548_p7944 | ST548_p3464 |
| ST548_p7296 | ST548_p5257 | ST548_p4364 | ST548_p4137 | ST548_p4611 |
| ST548_p4841 | ST548_p7855 | ST548_p7086 | ST548_p6814 | ST548_p5341 |

TABLE 1b
List of genes, particularly for Enterobacter cloacae

| | | | | |
|---|---|---|---|---|
| ENC_39630 | ENC_32540 | ENC_20090 | ENC_34110 | ENC_19160 |
| ENC_00130 | ENC_39120 | ENC_23520 | ENC_34890 | ENC_01640 |
| ENC_01700 | ENC_12700 | ENC_07150 | ENC_18520 | ENC_03650 |
| ENC_03660 | ENC_09780 | ENC_18300 | ENC_21490 | ENC_42450 |
| ENC_45970 | ENC_06960 | ENC_42440 | ENC_44970 | ENC_15210 |
| ENC_16040 | ENC_18950 | ENC_34310 | ENC_04740 | ENC_26480 |
| ENC_04560 | ENC_21110 | ENC_17620 | ENC_15900 | ENC_18290 |
| ENC_26190 | ENC_28140 | ENC_42910 | ENC_04700 | ENC_29120 |
| ENC_08830 | ENC_33440 | ENC_18400 | ENC_32020 | ENC_42660 |
| ENC_13620 | ENC_25610 | ENC_02110 | ENC_02570 | ENC_06620 |

TABLE 2a
List of genes, particularly for Enterobacter aerogenes

| | | |
|---|---|---|
| ST548_p8085 | ST548_p3778 | ST548_p5387 |
| ST548_p7737 | ST548_p5658 | ST548_p4310 |

TABLE 2b
List of genes, particularly for Enterobacter cloacae

| | | |
|---|---|---|
| ENC_39630 | ENC_32540 | ENC_20090 |
| ENC_44710 | ENC_46830 | ENC_37880 |
| ENC_04160 | ENC_26410 | ENC_05800 |
| ENC_43540 | ENC_38400 | ENC_30490 |

[0029] In step b) above, as well as corresponding steps, at least one mutation in at least two genes is determined, so that in total at least two mutations are determined, wherein the two mutations are in different genes.

[0030] According to a second aspect, the present invention relates to a method of selecting a treatment of a patient suffering from an infection with a potentially resistant Enterobacter strain, e.g. from an antimicrobial drug, e.g. antibiotic, resistant Enterobacter infection, comprising the steps of:

a) obtaining or providing a sample containing or suspected of containing at least one Enterobacter species from the patient;
b) determining the presence of at least one mutation in at least two genes from the group of genes listed in Table 1a and/or Table 1b, or Table 2a and/or Table 2b above, wherein the presence of said at least two mutations is indicative of a resistance to one or more antimicrobial, e.g. antibiotic, drugs;
c) identifying said at least one or more antimicrobial, e.g. antibiotic, drugs; and
d) selecting one or more antimicrobial, e.g. antibiotic, drugs different from the ones identified in step c) and being suitable for the treatment of an Enterobacter infection.

[0031] A third aspect of the present invention relates to a method of determining an antimicrobial drug, e.g. antibiotic, resistance profile for bacterial microorganisms of Enterobacter species, comprising:

obtaining or providing a first data set of gene sequences of a plurality of clinical isolates of Enterobacter species; providing a second data set of antimicrobial drug, e.g. antibiotic, resistance of the plurality of clinical isolates of Enterobacter species;
aligning the gene sequences of the first data set to at least one, preferably one or two, preferably one, reference genome(s) of Enterobacter, and/or assembling the gene sequence of the first data set, at least in part;
analyzing the gene sequences of the first data set for genetic variants to obtain a third data set of genetic variants; correlating the third data set with the second data set and statistically analyzing the correlation; and
determining the genetic sites in the genome of Enterobacter associated with antimicrobial drug, e.g. antibiotic, resistance.

[0032] In addition, the present invention relates in a fourth aspect to a method of determining an antimicrobial drug, e.g. antibiotic, resistance profile for a bacterial microorganism belonging to the species Enterobacter comprising the steps of

a) obtaining or providing a sample containing or suspected of containing the bacterial microorganism;
b) determining the presence of a mutation in at least one gene of the bacterial microorganism as determined by the method according to the third aspect of the present invention;
wherein the presence of a mutation is indicative of a resistance to an antimicrobial, e.g. antibiotic, drug.

[0033] Furthermore, the present invention discloses in a fifth aspect a diagnostic method of determining an infection of a patient with Enterobacter species potentially resistant to antimicrobial drug treatment, which can, like in the first aspect, also be described as method of determining an antimicrobial drug, e.g. antibiotic, resistant Enterobacter infection of a patient, comprising the steps of:

a) obtaining or providing a sample containing or suspected of containing a bacterial microorganism belonging to the species Enterobacter from the patient;
b) determining the presence of at least one mutation in at least one gene of the bacterial microorganism belonging to the species Enterobacter as determined by the method according to the third aspect of the present invention, wherein the presence of said at least one mutation is indicative of an antimicrobial drug, e.g. antibiotic, resistant Enterobacter infection in said patient.

[0034] Also disclosed is in a sixth aspect a method of selecting a treatment of a patient suffering from an infection with a potentially resistant Enterobacter strain, e.g. from an antimicrobial drug, e.g. antibiotic, resistant Enterobacter infection, comprising the steps of:

a) obtaining or providing a sample containing or suspected of containing a bacterial microorganism belonging to the species Enterobacter from the patient;
b) determining the presence of at least one mutation in at least one gene of the bacterial microorganism belonging to the species Enterobacter as determined by the method according to the third aspect of the present invention, wherein the presence of said at least one mutation is indicative of a resistance to one or more antimicrobial, e.g. antibiotic, drugs;
c) identifying said at least one or more antimicrobial, e.g. antibiotic, drugs; and
d) selecting one or more antimicrobial, e.g. antibiotic, drugs different from the ones identified in step c) and being suitable for the treatment of an Enterobacter infection.

[0035] A seventh aspect of the present invention relates to a method of acquiring, respectively determining, an antimicrobial drug, e.g. antibiotic, resistance profile for a bacterial microorganism of Enterobacter species, comprising:

obtaining or providing a first data set of gene sequences of a clinical isolate of Enterobacter species;
providing a second data set of antimicrobial drug, e.g. antibiotic, resistance of a plurality of clinical isolates of Enterobacter species;
aligning the gene sequences of the first data set to at least one, preferably one or two, preferably one, reference genome(s) of Enterobacter, and/or assembling the gene sequence of the first data set, at least in part;
analyzing the gene sequences of the first data set for genetic variants to obtain a third data set of genetic variants of the first data set;
correlating the third data set with the second data set and statistically analyzing the correlation; and
determining the genetic sites in the genome of Enterobacter of the first data set associated with antimicrobial drug, e.g. antibiotic, resistance.

[0036] According to an eighth aspect, the present invention discloses a computer program product comprising executable instructions which, when executed, perform a method according to the third, fourth, fifth, sixth or seventh aspect of the present invention.

[0037] Further aspects and embodiments of the invention are disclosed in the dependent claims and can be taken from the following description, figures and examples, without being limited thereto.

### FIGURES

[0038] The enclosed drawings should illustrate embodiments of the present invention and convey a further understanding thereof. In connection with the description they serve as explanation of concepts and principles of the invention. Other embodiments and many of the stated advantages can be derived in relation to the drawings. The elements of the drawings are not necessarily to scale towards each other. Identical, functionally equivalent and acting equal features and components are denoted in the figures of the drawings with the same reference numbers, unless noted otherwise.

[0039] FIG. 1 shows schematically a read-out concept for a diagnostic test according to a method of the present invention.

### DETAILED DESCRIPTION OF THE PRESENT INVENTION

### Definitions

[0040] Unless defined otherwise, technical and scientific terms used herein have the same meaning as commonly understood by one of ordinary skill in the art to which this invention belongs.

[0041] An “antimicrobial drug” in the present invention refers to a group of drugs that includes antibiotics, antifungals, antiprotozoals, and antivirals. According to certain embodiments, the antimicrobial drug is an antibiotic.

[0042] The term “nucleic acid molecule” refers to a polynucleotide molecule having a defined sequence. It comprises DNA molecules, RNA molecules, nucleotide analog molecules and combinations and derivatives thereof, such as DNA molecules or RNA molecules with incorporated nucleotide analogs or cDNA.

[0043] The term “nucleic acid sequence information” relates to information which can be derived from the sequence of a nucleic acid molecule, such as the sequence itself or a variation in the sequence as compared to a reference sequence.

[0044] The term “mutation” relates to a variation in the sequence as compared to a reference sequence. Such a reference sequence can be a sequence determined in a predominant wild type organism or a reference organism, e.g. a defined and known bacterial strain or substrain. A mutation is for example a deletion of one or multiple nucleotides, an insertion of one or multiple nucleotides, or substitution of one or multiple nucleotides, duplication of one or a sequence of multiple nucleotides, translocation of one or a sequence of multiple nucleotides, and, in particular, a single nucleotide polymorphism (SNP).

[0045] In the context of the present invention a “sample” is a sample which comprises at least one nucleic acid molecule from a bacterial microorganism. Examples for samples are: cells, tissue, body fluids, biopsy specimens, blood, urine, saliva, sputum, plasma, serum, cell culture supernatant, swab sample and others. According to certain embodiments, the sample is a patient sample (clinical isolate).

[0046] New and highly efficient methods of sequencing nucleic acids referred to as next generation sequencing have opened the possibility of large scale genomic analysis. The term “next generation sequencing” or “high throughput sequencing” refers to high-throughput sequencing technologies that parallelize the sequencing process, producing thousands or millions of sequences at once. Examples include Massively Parallel Signature Sequencing (MPSS), Polony sequencing, 454 pyrosequencing, Illumina (Solexa) sequencing, SOLiD sequencing, Ion semiconductor sequencing, DNA nanoball sequencing, Helioscope™ single molecule sequencing, Single Molecule SMRT™ sequencing, Single Molecule real time (RNAP) sequencing, Nanopore DNA sequencing, Sequencing By Hybridization, Amplicon Sequencing, GnuBio.

[0047] Within the present description the term “microorganism” comprises the term microbe. The type of microorganism is not particularly restricted, unless noted otherwise or obvious, and, for example, comprises bacteria, viruses, fungi, microscopic algae and protozoa, as well as combinations thereof. According to certain aspects, it refers to one or more Enterobacter species, particularly Enterobacter aerogenes and/or Enterobacter cloacae.

[0048] A reference to a microorganism or microorganisms in the present description comprises a reference to one microorganism as well a plurality of microorganisms, e.g. two, three, four, five, six or more microorganisms.

[0049] A vertebrate within the present invention refers to animals having a vertebrae, which includes mammals—including humans, birds, reptiles, amphibians and fishes. The present invention thus is not only suitable for human medicine, but also for veterinary medicine.

[0050] According to certain embodiments, the patient in the present methods is a vertebrate, more preferably a mammal and most preferred a human patient.

[0051] Before the invention is described in exemplary detail, it is to be understood that this invention is not limited to the particular component parts of the process steps of the methods described herein as such methods may vary. It is also to be understood that the terminology used herein is for purposes of describing particular embodiments only, and is not intended to be limiting. It must be noted that, as used in the specification and the appended claims, the singular forms “a,” “an” and “the” include singular and/or plural referents unless the context clearly dictates otherwise. For example, the term “a” as used herein can be understood as one single entity or in the meaning of “one or more” entities. It is also to be understood that plural forms include singular and/or plural referents unless the context clearly dictates otherwise. It is moreover to be understood that, in case parameter ranges are given which are delimited by numeric values, the ranges are deemed to include these limitation values.

[0052] Regarding the dosage of the antimicrobial, e.g. antibiotic, drugs, it is referred to the established principles of pharmacology in human and veterinary medicine. For example, Forth, Henschler, Rummel “Allgemeine und spezielle Pharmakologie und Toxikologie”, 9th edition, 2005, pp. 781 919, might be used as a guideline. Regarding the formulation of a ready-to-use medicament, reference is made to “Remington, The Science and Practice of Pharmacy”, 22^{nd} edition, 2013, pp. 777-1070.

[0053] Assembling of a gene sequence can be carried out by any known method and is not particularly limited.

[0054] According to certain embodiments, mutations that were found using alignments can also be compared or matched with alignment-free methods, e.g. for detecting single base exchanges, for example based on contigs that were found by assemblies. For example, reads obtained from sequencing can be assembled to contigs and the contigs can be compared to each other.

[0055] According to a first aspect, the present invention relates to a diagnostic method of determining an infection of a patient with Enterobacter species, particularly Enterobacter aerogenes and/or Enterobacter cloacae, potentially resistant to antimicrobial drug treatment, which can also be described as method of determining an antimicrobial drug, e.g. antibiotic, resistant Enterobacter, particularly Enterobacter aerogenes and/or Enterobacter cloacae, infection of a patient, comprising the steps of:

a) obtaining or providing a sample containing or suspected of containing at least one Enterobacter species, particularly Enterobacter aerogenes and/or Enterobacter cloacae, from the patient;
b) determining the presence of at least one mutation in at least two genes from the group of genes consisting of ST548_p8085, ST548_p3778, ST548_p5387, ST548_p7737, ST548_p7940, ST548_p7919, ST548_p7543, ST548_p7426, ST548_p7336, ST548_p7239, ST548_p6918, ST548_p6844, ST548_p6794, ST548_p6618, ST548_p6494, ST548_p6478, ST548_p6451, ST548_p6386, ST548_p6367, ST548_p6066, ST548_p5966, ST548_p5904, ST548_p5779, ST548_p5658, ST548_p5474, ST548_p5447, ST548_p5300, ST548_p5259, ST548_p5115, ST548_p5081, ST548_p4891, ST548_p4836, ST548_p4577, ST548_p4310, ST548_p4203, ST548_p4107, ST548_p3593, ST548_p3452, ST548_p7944, ST548_p3464, ST548_p7296, ST548_p5257, ST548_p4364, ST548_p4137, ST548_p4611, ST548_p4841, ST548_p7855, ST548_p7086, ST548_p6814, and ST548_p5341, preferably ST548_p5387, ST548_p7737, ST548_p7940, ST548_p7919, ST548_p7543, ST548_p7426, ST548_p7336, ST548_p7239, ST548_p6918, ST548_p6844, ST548_p6794, ST548_p6618, ST548_p6494, ST548_p6478, ST548_p6451, ST548_p6386, ST548_p6367, ST548_p6066, ST548_p5966, ST548_p5904, ST548_p5779, ST548_p5658, ST548_p5474, ST548_p5447, ST548_p5300, ST548_p5259, ST548_p5115, ST548_p5081, ST548_p4891, ST548_p4836, ST548_p4577, ST548_p4310, ST548_p4203, ST548_p4107, ST548_p3593, ST548_p3452, ST548_p7944, ST548_p3464, ST548_p7296, ST548_p5257, ST548_p4364, ST548_p4137, ST548_p4611, ST548_p4841, ST548_p7855, ST548_p7086, ST548_p6814, and ST548_p5341, and/or ENC_39630, ENC_32540, ENC_20090, ENC_34110, ENC_19160, ENC_00130, ENC_39120, ENC_23520, ENC_34890, ENC_01640, ENC_01700, ENC_12700, ENC_07150, ENC_18520, ENC_03650, ENC_03660, ENC_09780, ENC_18300, ENC_21490, ENC_42450, ENC_45970, ENC_06960, ENC_42440, ENC_44970, ENC_15210, ENC_16040, ENC_18950, ENC_34310, ENC_04740, ENC_26480, ENC_04560, ENC_21110, ENC_17620, ENC_15900, ENC_18290, ENC_26190, ENC_28140, ENC_42910, ENC_04700, ENC_29120, ENC_08830, ENC_33440, ENC_18400, ENC_32020, ENC_42660, ENC_13620, ENC_25610, ENC_02110, ENC_02570, and ENC_06620, preferably ENC_20090, ENC_34110, ENC_19160, ENC_00130, ENC_39120, ENC_23520, ENC_34890, ENC_01640, ENC_01700, ENC_12700, ENC_07150, ENC_18520, ENC_03650, ENC_03660, ENC_09780, ENC_18300, ENC_21490, ENC_42450, ENC_45970, ENC_06960, ENC_42440, ENC_44970, ENC_15210, ENC_16040, ENC_18950, ENC_34310, ENC_04740, ENC_26480, ENC_04560, ENC_21110, ENC_17620, ENC_15900, ENC_18290, ENC_26190, ENC_28140, ENC_42910, ENC_04700, ENC_29120, ENC_08830, ENC_33440, ENC_18400, ENC_32020, ENC_42660, ENC_13620, ENC_25610, ENC_02110, ENC_02570, and ENC_06620, or from the group of genes consisting of ST548_p8085, ST548_p3778, ST548_p5387, ST548_p7737, ST548_p5658, and ST548_p4310, preferably ST548_p5387, ST548_p7737, ST548_p5658, and ST548_p4310, and/or ENC_39630, ENC_32540, ENC_20090, ENC_44710, ENC_46830, ENC_37880, ENC_04160, ENC_26410, ENC_05800, ENC_43540, ENC_38400, and ENC_30490, preferably ENC_20090, ENC_44710, ENC_46830, ENC_37880, ENC_04160, ENC_26410, ENC_05800, ENC_43540, ENC_38400, and ENC_30490, wherein the presence of said at least two mutations is indicative of an infection with an antimicrobial, e.g. antibiotic, resistant Enterobacter, particularly Enterobacter aerogenes and/or Enterobacter cloacae, strain in said patient.

[0056] According to certain embodiments, the method of the first aspect relates to a diagnostic method of determining an infection of a patient with Enterobacter species, particularly Enterobacter aerogenes, potentially resistant to antimicrobial drug treatment, which can also be described as method of determining an antimicrobial drug, e.g. antibiotic, resistant Enterobacter, particularly Enterobacter aerogenes, infection of a patient, comprising the steps of:

a) obtaining or providing a sample containing or suspected of containing at least one Enterobacter, particularly Enterobacter aerogenes, species from the patient;
b) determining the presence of at least one mutation in at least two genes from the group of genes consisting of ST548_p8085, ST548_p3778, ST548_p5387, ST548_p7737, ST548_p7940, ST548_p7919, ST548_p7543, ST548_p7426, ST548_p7336, ST548_p7239, ST548_p6918, ST548_p6844, ST548_p6794, ST548_p6618, ST548_p6494, ST548_p6478, ST548_p6451, ST548_p6386, ST548_p6367, ST548_p6066, ST548_p5966, ST548_p5904, ST548_p5779, ST548_p5658, ST548_p5474, ST548_p5447, ST548_p5300, ST548_p5259, ST548_p5115, ST548_p5081, ST548_p4891, ST548_p4836, ST548_p4577, ST548_p4310, ST548_p4203, ST548_p4107, ST548_p3593, ST548_p3452, ST548_p7944, ST548_p3464, ST548_p7296, ST548_p5257, ST548_p4364, ST548_p4137, ST548_p4611, ST548_p4841, ST548_p7855, ST548_p7086, ST548_p6814, and ST548_p5341, preferably ST548_p5387, ST548_p7737, ST548_p7940, ST548_p7919, ST548_p7543, ST548_p7426, ST548_p7336, ST548_p7239, ST548_p6918, ST548_p6844, ST548_p6794, ST548_p6618, ST548_p6494, ST548_p6478, ST548_p6451, ST548_p6386, ST548_p6367, ST548_p6066, ST548_p5966, ST548_p5904, ST548_p5779, ST548_p5658, ST548_p5474, ST548_p5447, ST548_p5300, ST548_p5259, ST548_p5115, ST548_p5081, ST548_p4891, ST548_p4836, ST548_p4577, ST548_p4310, ST548_p4203, ST548_p4107, ST548_p3593, ST548_p3452, ST548_p7944, ST548_p3464, ST548_p7296, ST548_p5257, ST548_p4364, ST548_p4137, ST548_p4611, ST548_p4841, ST548_p7855, ST548_p7086, ST548_p6814, and ST548_p5341, or from the group of genes consisting of ST548_p8085, ST548_p3778, ST548_p5387, ST548_p7737, ST548_p5658, and ST548_p4310, preferably ST548_p5387, ST548_p7737, ST548_p5658, and ST548_p4310, wherein the presence of said at least two mutations is indicative of an infection with an antimicrobial, e.g. antibiotic, resistant Enterobacter, particularly Enterobacter aerogenes, strain in said patient.

[0057] According to certain embodiments, the method of the first aspect relates to a diagnostic method of determining an infection of a patient with Enterobacter species, particularly Enterobacter cloacae, potentially resistant to antimicrobial drug treatment, which can also be described as method of determining an antimicrobial drug, e.g. antibiotic, resistant Enterobacter, particularly Enterobacter cloacae, infection of a patient, comprising the steps of:

a) obtaining or providing a sample containing or suspected of containing at least one Enterobacter species, particularly Enterobacter cloacae, from the patient;
b) determining the presence of at least one mutation in at least two genes from the group of genes consisting of ENC_39630, ENC_32540, ENC_20090, ENC_34110, ENC_19160, ENC_00130, ENC_39120, ENC_23520, ENC_34890, ENC_01640, ENC_01700, ENC_12700, ENC_07150, ENC_18520, ENC_03650, ENC_03660, ENC_09780, ENC_18300, ENC_21490, ENC_42450, ENC_45970, ENC_06960, ENC_42440, ENC_44970, ENC_15210, ENC_16040, ENC_18950, ENC_34310, ENC_04740, ENC_26480, ENC_04560, ENC_21110, ENC_17620, ENC_15900, ENC_18290, ENC_26190, ENC_28140, ENC_42910, ENC_04700, ENC_29120, ENC_08830, ENC_33440, ENC_18400, ENC_32020, ENC_42660, ENC_13620, ENC_25610, ENC_02110, ENC_02570, and ENC_06620, preferably ENC_20090, ENC_34110, ENC_19160, ENC_00130, ENC_39120, ENC_23520, ENC_34890, ENC_01640, ENC_01700, ENC_12700, ENC_07150, ENC_18520, ENC_03650, ENC_03660, ENC_09780, ENC_18300, ENC_21490, ENC_42450, ENC_45970, ENC_06960, ENC_42440, ENC_44970, ENC_15210, ENC_16040, ENC_18950, ENC_34310, ENC_04740, ENC_26480, ENC_04560, ENC_21110, ENC_17620, ENC_15900, ENC_18290, ENC_26190, ENC_28140, ENC_42910, ENC_04700, ENC_29120, ENC_08830, ENC_33440, ENC_18400, ENC_32020, ENC_42660, ENC_13620, ENC_25610, ENC_02110, ENC_02570, and ENC_06620, or from the group of genes consisting of ENC_39630, ENC_32540, ENC_20090, ENC_44710, ENC_46830, ENC_37880, ENC_04160, ENC_26410, ENC_05800, ENC_43540, ENC_38400, and ENC_30490, preferably ENC_20090, ENC_44710, ENC_46830, ENC_37880, ENC_04160, ENC_26410, ENC_05800, ENC_43540, ENC_38400, and ENC_30490, wherein the presence of said at least two mutations is indicative of an infection with an antimicrobial, e.g. antibiotic, resistant Enterobacter, particularly Enterobacter cloacae, strain in said patient.

[0058] In this method, as well as the other methods of the invention, the sample can be provided or obtained in any way, preferably non-invasive, and can be e.g. provided as an in vitro sample or prepared as in vitro sample.

[0059] According to certain aspects, mutations in at least two, three, four, five, six, seven, eight, nine or ten genes are determined in any of the methods of the present invention, e.g. in at least two genes or in at least three genes. Instead of testing only single genes or mutants, a combination of several variant positions can improve the prediction accuracy and further reduce false positive findings that are influenced by other factors. Therefore, it is in particular preferred to determine the presence of a mutation in 2, 3, 4, 5, 6, 7, 8 or 9 (or more) genes selected from Table 1 or 2.

[0060] For the above genes, i.e. the genes also denoted in Tables 1a and 2a, the highest probability of a resistance to at least one antimicrobial drug, e.g. antibiotic, could be observed, with p-values smaller than 10⁻¹⁰, particularly smaller than 10⁻¹¹, particularly smaller than 10⁻³⁰, indicating the high significance of the values (n=299; α=0.05), and for the above genes, i.e. the genes also denoted in Tables 1b and 2b, the highest probability of a resistance to at least one antimicrobial drug, e.g. antibiotic, could be observed, with p-values smaller than 10⁻¹⁰, particularly smaller than 10⁻¹¹, particularly smaller than 10⁻²⁵, particularly smaller than 10⁻⁴⁰, indicating the high significance of the values (n=400; α=0.05).

[0061] Details regarding Tables 1a and 2a can be taken from Tables 3a and 4a, 4b, 4c disclosed in the Examples, and details regarding Tables 1b and 2b can be taken from Tables 3b and 4d, 4e, 4f disclosed in the Examples.

[0062] Having at least two genes with mutations determined, a high probability of an antimicrobial drug, e.g. antibiotic, resistance could be determined. The genes in Tables 1a and 1b thereby represent the 50 best genes for which a mutation was observed in the genomes of Enterobacter species, whereas the genes in Tables 2a and 2b represent the best genes for which a cross-correlation could be observed for the antimicrobial drug, e.g. antibiotic, susceptibility testing for Enterobacter species as described below.

[0063] According to certain embodiments, the obtaining or providing a sample containing or suspected of containing at least one Enterobacter species, particularly Enterobacter aerogenes and/or Enterobacter cloacae, from the patient in this method—as well as the other methods of the invention—can comprise the following:

[0064] A sample of a vertebrate, e.g. a human, e.g. is provided or obtained and nucleic acid sequences, e.g. DNA or RNA sequences, are recorded by a known method for recording nucleic acid, which is not particularly limited. For example, nucleic acid can be recorded by a sequencing method, wherein any sequencing method is appropriate, particularly sequencing methods wherein a multitude of sample components, as e.g. in a blood sample, can be analyzed for nucleic acids and/or nucleic acid fragments and/or parts thereof contained therein in a short period of time, including the nucleic acids and/or nucleic acid fragments and/or parts thereof of at least one microorganism of interest, particularly of at least one Enterobacter species, particularly Enterobacter aerogenes and/or Enterobacter cloacae. For example, sequencing can be carried out using polymerase chain reaction (PCR), particularly multiplex PCR, or high throughput sequencing or next generation sequencing, preferably using high-throughput sequencing. For sequencing, preferably an in vitro sample is used.

[0065] The data obtained by the sequencing can be in any format, and can then be used to identify the nucleic acids, and thus genes, of the microorganism, e.g. of Enterobacter species, particularly Enterobacter aerogenes and/or Enterobacter cloacae, to be identified, by known methods, e.g. fingerprinting methods, comparing genomes and/or aligning to at least one, or more, genomes of one or more species of the microorganism of interest, i.e. a reference genome, etc., forming a third data set of aligned genes for an Enterobacter species, particularly Enterobacter aerogenes and/or Enterobacter cloacae—discarding additional data from other sources, e.g. the vertebrate. Reference genomes are not particularly limited and can be taken from several databases. Depending on the microorganism, different reference genomes or more than one reference genomes can be used for aligning. Using the reference genome—as well as also the data from the genomes of the other species, e.g. Enterobacter species, particularly Enterobacter aerogenes and/or Enterobacter cloacae—mutations in the genes for each species and for the whole multitude of samples of different species, e.g. Enterobacter species, particularly Enterobacter aerogenes and/or Enterobacter cloacae, can be obtained.

[0066] For example, it is useful in genome-wide association studies to reference the points of interest, e.g. mutations, to one constant reference for enhanced standardization. In case of the human with a high consistency of the genome and 99% identical sequences among individuals this is easy and represents the standard, as corresponding reference genomes are available in databases. In case of organisms that trigger infectious diseases (e.g. bacteria and viruses) this is much more difficult, though. One possibility is to fall back on a virtual pan genome which contains all sequences of a certain genus. A further possibility is the analysis of all available references, which is much more complex. Therein all n references from a database (e.g. RefSeq) are extracted and compared with the newly sequenced bacterial genomes k. After this, matrices (% of mapped reads, % of covered genome) are applied to estimate which reference is best suited to all new bacteria. However, n×k complete alignments are carried out. Having a big number of references, though, stable results can be obtained, as is the case for Enterobacter, particularly Enterobacter aerogenes and/or Enterobacter cloacae.

[0067] According to certain embodiments, the genomes of Enterobacter species, particularly Enterobacter aerogenes and/or Enterobacter cloacae, are referenced to one reference genome. However, it is not excluded that for other microorganisms more than one reference genome is used. In the present methods, a reference genome of Enterobacter, particularly Enterobacter aerogenes, is NC_020181, as annotated at the NCBI, and another reference genome of Enterobacter, particularly Enterobacter cloacae, is NC_021046, according to certain embodiments. The reference genomes are attached to this application as sequence listings with SEQ ID NO 1 for Enterobacter aerogenes genome NC_020181 and SEQ ID NO 2 for Enterobacter cloacae genome NC_021046.

[0068] One reference sequence was obtained from Enterobacter, particularly Enterobacter aerogenes, strain NC_020181 (http://www.genome.jp/dbget-bin/www bget?refseq+NC_020181) LOCUS NC_020181 5419609 bp DNA circular CON 7 Feb. 2015 DEFINITION Enterobacter aerogenes EA1509E complete genome.

| | |
|---|---|
| ACCESSION | NC_020181 |
| VERSION | NC_020181.1 GI:444350194 |
| DBLINK | BioProject: PRJNA224116 |
| | Assembly: GCF_000334515.1 |
| KEYWORDS | RefSeq. |
| SOURCE | Enterobacter aerogenes EA1509E |
| ORGANISM | Enterobacter aerogenes EA1509E |
| | Bacteria; Proteobacteria; Gammaproteobacteria; |
| | Enterobacteriales; Enterobacteriaceae; Enterobacter. |
| REFERENCE | 1 |
| AUTHORS | Diene, S. M., Merhej, V., Henry, M., El Filali, A., |
| | Roux, V., Robert, C., Azza, S., Gavory, F., Barbe, V., |
| | La Scola, B., Raoult, D. and Rolain, J. M. |
| TITLE | The rhizome of the multidrug-resistant |

[0069] Enterobacter aerogenes genome reveals how new ‘killer bugs’ are created because of a sympatric lifestyle

| | |
|---|---|
| JOURNAL | Mol. Biol. Evol. 30 (2), 369-383 (2013) |
| PUBMED | 23071100 |
| REFERENCE | 2 (bases 1 to 5419609) |
| AUTHORS | Genoscope -, C. E. A. |
| TITLE | Direct Submission |
| JOURNAL | Submitted (13 Mar. 2012) Genoscope - Centre |
| | National de Sequencage: BP 191 91006 EVRY cedex - |
| | FRANCE (E-mail: seqref@genoscope.cns.fr - |
| | Web: www.genoscope.cns.fr) |

[0070] Another reference sequence was obtained from Enterobacter, particularly Enterobacter cloacae, strain NC_021046 (http://www.genome.jp/dbget-bin/www bget?refseq+NC_021046) LOCUS NC_021046 4908759 bp DNA linear CON 18 Dec. 2014 DEFINITION Enterobacter cloacae subsp. cloacae NCTC 9394 draft genome.

| | |
|---|---|
| ACCESSION | NC_021046 |
| VERSION | NC_021046.1 GI:479270911 |
| DBLINK | BioProject: PRJNA197202 |
| KEYWORDS | RefSeq. |
| SOURCE | Enterobacter cloacae subsp. cloacae NCTC 9394 |
| ORGANISM | Enterobacter cloacae subsp. cloacae NCTC 9394 |
| | Bacteria; Proteobacteria; Gammaproteobacteria; |
| | Enterobacteriales; Enterobacteriaceae; Enterobacter; |
| | Enterobacter cloacae complex. |
| REFERENCE | 1 |
| AUTHORS | Pajon, A., Turner, K. and Parkhill, J. |
| CONSRTM | metaHIT consortium -- http://www.metahit.eu/ |
| TITLE | The genome sequence of Enterobacter cloacae |
| | NCTC 9394 |
| JOURNAL | Unpublished |
| REFERENCE | 2 (bases 1 to 4908759) |
| CONSRTM | NCBI Genome Project |
| TITLE | Direct Submission |
| JOURNAL | Submitted (15 Apr. 2013) National Center for |
| | Biotechnology Information, NIH, Bethesda, MD 20894, |
| | USA |
| REFERENCE | 3 |
| AUTHORS | Pajon, A. |
| TITLE | Direct Submission |
| JOURNAL | Submitted (23 Mar. 2010) Sanger Institute, Wellcome |
| | Trust Genome Campus, Hinxton, Cambridge CB10 1SA, |
| | United Kingdom |

[0071] Alternatively or in addition, the gene sequence of the first data set can be assembled, at least in part, with known methods, e.g. by de-novo assembly or mapping assembly. The sequence assembly is not particularly limited, and any known genome assembler can be used, e.g. based on Sanger, 454, Solexa, Illumina, SOLid technologies, etc., as well as hybrids/mixtures thereof.

[0072] According to certain embodiments, the data of nucleic acids of different origin than the microorganism of interest, e.g. Enterobacter species, particularly Enterobacter aerogenes and/or Enterobacter cloacae, can be removed after the nucleic acids of interest are identified, e.g. by filtering the data out. Such data can e.g. include nucleic acids of the patient, e.g. the vertebrate, e.g. human, and/or other microorganisms, etc. This can be done by e.g. computational subtraction, as developed by Meyerson et al. 2002. For this, also aligning to the genome of the vertebrate, etc., is possible. For aligning, several alignment-tools are available. This way the original data amount from the sample can be drastically reduced.

[0073] Also after such removal of “excess” data, fingerprinting and/or aligning, and/or assembly, etc. can be carried out, as described above, forming a third data set of aligned and/or assembled genes for an Enterobacter species, particularly Enterobacter aerogenes and/or Enterobacter cloacae.

[0074] Using these techniques, genes with mutations of the microorganism of interest, e.g. Enterobacter species, particularly Enterobacter aerogenes and/or Enterobacter cloacae, can be obtained for various species.

[0075] When testing these same species for antimicrobial drug, e.g. antibiotic, susceptibility of a number of antimicrobial drugs, e.g. antibiotics, e.g. using standard culturing methods on dishes with antimicrobial drug, e.g. antibiotic, intake, as e.g. described below, the results of these antimicrobial drug, e.g. antibiotic, susceptibility tests can then be cross-referenced/correlated with the mutations in the genome of the respective microorganism, e.g. Enterobacter, particularly Enterobacter aerogenes and/or Enterobacter cloacae. Using several, e.g. 50 or more than 50, 100 or more than 100, 200 or more than 200, 250 or more than 250, 300 or more than 300, 350 or more than 350 different species of a microorganism, e.g. different Enterobacter species, particularly Enterobacter aerogenes and/or Enterobacter cloacae, statistical analysis can be carried out on the obtained cross-referenced data between mutations and antimicrobial drug, e.g. antibiotic, susceptibility for these number of species, using known methods.

[0076] Regarding culturing methods, samples can be e.g. cultured overnight. On the next day individual colonies can be used for identification of organisms, either by culturing or using mass spectroscopy. Based on the identity of organisms new plates containing increasing concentration of antibiotics used for the treatment of these organisms are inoculated and grown for additional 12-24 hours. The lowest drug concentration which inhibits growth (minimal inhibitory concentration—MIC) can be used to determine susceptibility/resistance for tested antibiotics.

[0077] Correlation of the nucleic acid/gene mutations with antimicrobial drug, e.g. antibiotic, resistance can be carried out in a usual way and is not particularly limited. For example, resistances can be correlated to certain genes or certain mutations, e.g. SNPs, in genes. After correlation, statistical analysis can be carried out.

[0078] In addition, statistical analysis of the correlation of the gene mutations with antimicrobial drug, e.g. antibiotic, resistance is not particularly limited and can be carried out, depending on e.g. the amount of data, in different ways, for example using analysis of variance (ANOVA) or Student's t-test, for example with a sample size n of 50 or more, 100 or more, 200 or more, 250 or more, 300 or more or 350 or more, and a level of significance (α-error-level) of e.g. 0.05 or smaller, e.g. 0.05, preferably 0.01 or smaller. A statistical value can be obtained for each gene and/or each position in the genome as well as for all antibiotics tested, a group of antibiotics or a single antibiotic. The obtained p-values can also be adapted for statistical errors, if needed.

[0079] For statistically sound results a multitude of individuals should be sampled, with n=50, 100, 200, 250, 300 or 350, and a level of significance (α-error-level) of e.g. 0.05 or smaller, e.g. 0.05, preferably 0.01 or smaller. According to certain embodiments, particularly significant results can be obtained for n=200, 250, 300 or 350.

[0080] For statistically sound results a multitude of individuals should be sampled, with n=50 or more, 100 or more, 200 or more, 250 or more, 300 or more or 350 or more, and a level of significance (α-error-level) of e.g. 0.05 or smaller, e.g. 0.05, preferably 0.01 or smaller. According to certain embodiments, particularly significant results can be obtained for n=200 or more, 250 or more, 300 or more or 350 or more.

[0081] After the above procedure has been carried out for more than 250, e.g. 299, and/or more than 350, e.g. 400, individual species of Enterobacter, particularly Enterobacter aerogenes and/or Enterobacter cloacae, respectively, the data disclosed in Tables 1a and 1b and 2a and 2b were obtained for the statistically best correlations between gene mutations and antimicrobial drug, e.g. antibiotic, resistances. Thus, mutations in these genes were proven as valid markers for antimicrobial drug, e.g. antibiotic, resistance.

[0082] According to a further aspect, the present invention relates in a second aspect to a method of selecting a treatment of a patient suffering from an infection with a potentially resistant Enterobacter strain, particularly Enterobacter aerogenes and/or Enterobacter cloacae, e.g. from an antimicrobial drug, e.g. antibiotic, resistant Enterobacter, particularly Enterobacter aerogenes and/or Enterobacter cloacae, infection, comprising the steps of:

a) obtaining or providing a sample containing or suspected of containing at least one Enterobacter species, particularly Enterobacter aerogenes and/or Enterobacter cloacae, from the patient;
b) determining the presence of at least one mutation in at least two genes from the group of genes consisting of ST548_p8085, ST548_p3778, ST548_p5387, ST548_p7737, ST548_p7940, ST548_p7919, ST548_p7543, ST548_p7426, ST548_p7336, ST548_p7239, ST548_p6918, ST548_p6844, ST548_p6794, ST548_p6618, ST548_p6494, ST548_p6478, ST548_p6451, ST548_p6386, ST548_p6367, ST548_p6066, ST548_p5966, ST548_p5904, ST548_p5779, ST548_p5658, ST548_p5474, ST548_p5447, ST548_p5300, ST548_p5259, ST548_p5115, ST548_p5081, ST548_p4891, ST548_p4836, ST548_p4577, ST548_p4310, ST548_p4203, ST548_p4107, ST548_p3593, ST548_p3452, ST548_p7944, ST548_p3464, ST548_p7296, ST548_p5257, ST548_p4364, ST548_p4137, ST548_p4611, ST548_p4841, ST548_p7855, ST548_p7086, ST548_p6814, and ST548_p5341, preferably ST548_p5387, ST548_p7737, ST548_p7940, ST548_p7919, ST548_p7543, ST548_p7426, ST548_p7336, ST548_p7239, ST548_p6918, ST548_p6844, ST548_p6794, ST548_p6618, ST548_p6494, ST548_p6478, ST548_p6451, ST548_p6386, ST548_p6367, ST548_p6066, ST548_p5966, ST548_p5904, ST548_p5779, ST548_p5658, ST548_p5474, ST548_p5447, ST548_p5300, ST548_p5259, ST548_p5115, ST548_p5081, ST548_p4891, ST548_p4836, ST548_p4577, ST548_p4310, ST548_p4203, ST548_p4107, ST548_p3593, ST548_p3452, ST548_p7944, ST548_p3464, ST548_p7296, ST548_p5257, ST548_p4364, ST548_p4137, ST548_p4611, ST548_p4841, ST548_p7855, ST548_p7086, ST548_p6814, and ST548_p5341, and/or ENC_39630, ENC_32540, ENC_20090, ENC_34110, ENC_19160, ENC_00130, ENC_39120, ENC_23520, ENC_34890, ENC_01640, ENC_01700, ENC_12700, ENC_07150, ENC_18520, ENC_03650, ENC_03660, ENC_09780, ENC_18300, ENC_21490, ENC_42450, ENC_45970, ENC_06960, ENC_42440, ENC_44970, ENC_15210, ENC_16040, ENC_18950, ENC_34310, ENC_04740, ENC_26480, ENC_04560, ENC_21110, ENC_17620, ENC_15900, ENC_18290, ENC_26190, ENC_28140, ENC_42910, ENC_04700, ENC_29120, ENC_08830, ENC_33440, ENC_18400, ENC_32020, ENC_42660, ENC_13620, ENC_25610, ENC_02110, ENC_02570, and ENC_06620, preferably ENC_20090, ENC_34110, ENC_19160, ENC_00130, ENC_39120, ENC_23520, ENC_34890, ENC_01640, ENC_01700, ENC_12700, ENC_07150, ENC_18520, ENC_03650, ENC_03660, ENC_09780, ENC_18300, ENC_21490, ENC_42450, ENC_45970, ENC_06960, ENC_42440, ENC_44970, ENC_15210, ENC_16040, ENC_18950, ENC_34310, ENC_04740, ENC_26480, ENC_04560, ENC_21110, ENC_17620, ENC_15900, ENC_18290, ENC_26190, ENC_28140, ENC_42910, ENC_04700, ENC_29120, ENC_08830, ENC_33440, ENC_18400, ENC_32020, ENC_42660, ENC_13620, ENC_25610, ENC_02110, ENC_02570, and ENC_06620, or from the group of genes consisting of ST548_p8085, ST548_p3778, ST548_p5387, ST548_p7737, ST548_p5658, and ST548_p4310, preferably ST548_p5387, ST548_p7737, ST548_p5658, and ST548_p4310, and/or ENC_39630, ENC_32540, ENC_20090, ENC_44710, ENC_46830, ENC_37880, ENC_04160, ENC_26410, ENC_05800, ENC_43540, ENC_38400, and ENC_30490, preferably ENC_20090, ENC_44710, ENC_46830, ENC_37880, ENC_04160, ENC_26410, ENC_05800, ENC_43540, ENC_38400, and ENC_30490, wherein the presence of said at least two mutations is indicative of a resistance to one or more antimicrobial, e.g. antibiotic, drugs;
c) identifying said at least one or more antimicrobial, e.g. antibiotic, drugs; and
d) selecting one or more antimicrobial, e.g. antibiotic, drugs different from the ones identified in step c) and being suitable for the treatment of an Enterobacter, particularly Enterobacter aerogenes and/or Enterobacter cloacae, infection.

[0083] According to certain embodiments, the method of the second aspect relates to a method of selecting a treatment of a patient suffering from an infection with a potentially resistant Enterobacter strain, particularly Enterobacter aerogenes, e.g. from an antimicrobial drug, e.g. antibiotic, resistant Enterobacter, particularly Enterobacter aerogenes, infection, comprising the steps of:

a) obtaining or providing a sample containing or suspected of containing at least one Enterobacter species, particularly Enterobacter aerogenes, from the patient;
b) determining the presence of at least one mutation in at least two genes from the group of genes consisting of ST548_p8085, ST548_p3778, ST548_p5387, ST548_p7737, ST548_p7940, ST548_p7919, ST548_p7543, ST548_p7426, ST548_p7336, ST548_p7239, ST548_p6918, ST548_p6844, ST548_p6794, ST548_p6618, ST548_p6494, ST548_p6478, ST548_p6451, ST548_p6386, ST548_p6367, ST548_p6066, ST548_p5966, ST548_p5904, ST548_p5779, ST548_p5658, ST548_p5474, ST548_p5447, ST548_p5300, ST548_p5259, ST548_p5115, ST548_p5081, ST548_p4891, ST548_p4836, ST548_p4577, ST548_p4310, ST548_p4203, ST548_p4107, ST548_p3593, ST548_p3452, ST548_p7944, ST548_p3464, ST548_p7296, ST548_p5257, ST548_p4364, ST548_p4137, ST548_p4611, ST548_p4841, ST548_p7855, ST548_p7086, ST548_p6814, and ST548_p5341, preferably ST548_p5387, ST548_p7737, ST548_p7940, ST548_p7919, ST548_p7543, ST548_p7426, ST548_p7336, ST548_p7239, ST548_p6918, ST548_p6844, ST548_p6794, ST548_p6618, ST548_p6494, ST548_p6478, ST548_p6451, ST548_p6386, ST548_p6367, ST548_p6066, ST548_p5966, ST548_p5904, ST548_p5779, ST548_p5658, ST548_p5474, ST548_p5447, ST548_p5300, ST548_p5259, ST548_p5115, ST548_p5081, ST548_p4891, ST548_p4836, ST548_p4577, ST548_p4310, ST548_p4203, ST548_p4107, ST548_p3593, ST548_p3452, ST548_p7944, ST548_p3464, ST548_p7296, ST548_p5257, ST548_p4364, ST548_p4137, ST548_p4611, ST548_p4841, ST548_p7855, ST548_p7086, ST548_p6814, and ST548_p5341, or from the group of genes consisting of ST548_p8085, ST548_p3778, ST548_p5387, ST548_p7737, ST548_p5658, and ST548_p4310, preferably ST548_p5387, ST548_p7737, ST548_p5658, and ST548_p4310, wherein the presence of said at least two mutations is indicative of a resistance to one or more antimicrobial, e.g. antibiotic, drugs;
c) identifying said at least one or more antimicrobial, e.g. antibiotic, drugs; and
d) selecting one or more antimicrobial, e.g. antibiotic, drugs different from the ones identified in step c) and being suitable for the treatment of an Enterobacter, particularly Enterobacter aerogenes, infection.

[0084] According to certain embodiments, the method of the second aspect relates to a method of selecting a treatment of a patient suffering from an infection with a potentially resistant Enterobacter strain, particularly Enterobacter cloacae, e.g. from an antimicrobial drug, e.g. antibiotic, resistant Enterobacter, particularly Enterobacter cloacae, infection, comprising the steps of:

a) obtaining or providing a sample containing or suspected of containing at least one Enterobacter species, particularly Enterobacter cloacae, from the patient;
b) determining the presence of at least one mutation in at least two genes from the group of genes consisting of ENC_39630, ENC_32540, ENC_20090, ENC_34110, ENC_19160, ENC_00130, ENC_39120, ENC_23520, ENC_34890, ENC_01640, ENC_01700, ENC_12700, ENC_07150, ENC_18520, ENC_03650, ENC_03660, ENC_09780, ENC_18300, ENC_21490, ENC_42450, ENC_45970, ENC_06960, ENC_42440, ENC_44970, ENC_15210, ENC_16040, ENC_18950, ENC_34310, ENC_04740, ENC_26480, ENC_04560, ENC_21110, ENC_17620, ENC_15900, ENC_18290, ENC_26190, ENC_28140, ENC_42910, ENC_04700, ENC_29120, ENC_08830, ENC_33440, ENC_18400, ENC_32020, ENC_42660, ENC_13620, ENC_25610, ENC_02110, ENC_02570, and ENC_06620, preferably ENC_20090, ENC_34110, ENC_19160, ENC_00130, ENC_39120, ENC_23520, ENC_34890, ENC_01640, ENC_01700, ENC_12700, ENC_07150, ENC_18520, ENC_03650, ENC_03660, ENC_09780, ENC_18300, ENC_21490, ENC_42450, ENC_45970, ENC_06960, ENC_42440, ENC_44970, ENC_15210, ENC_16040, ENC_18950, ENC_34310, ENC_04740, ENC_26480, ENC_04560, ENC_21110, ENC_17620, ENC_15900, ENC_18290, ENC_26190, ENC_28140, ENC_42910, ENC_04700, ENC_29120, ENC_08830, ENC_33440, ENC_18400, ENC_32020, ENC_42660, ENC_13620, ENC_25610, ENC_02110, ENC_02570, and ENC_06620, or from the group of genes consisting of ENC_39630, ENC_32540, ENC_20090, ENC_44710, ENC_46830, ENC_37880, ENC_04160, ENC_26410, ENC_05800, ENC_43540, ENC_38400, and ENC_30490, preferably ENC_20090, ENC_44710, ENC_46830, ENC_37880, ENC_04160, ENC_26410, ENC_05800, ENC_43540, ENC_38400, and ENC_30490, wherein the presence of said at least two mutations is indicative of a resistance to one or more antimicrobial, e.g. antibiotic, drugs;
c) identifying said at least one or more antimicrobial, e.g. antibiotic, drugs; and
d) selecting one or more antimicrobial, e.g. antibiotic, drugs different from the ones identified in step c) and being suitable for the treatment of an Enterobacter, particularly Enterobacter cloacae, infection.

[0085] In this method, the steps a) of obtaining or providing a sample and b) of determining the presence of at least one mutation are as in the method of the first aspect.

[0086] The identification of the at least one or more antimicrobial, e.g. antibiotic, drug in step c) is then based on the results obtained in step b) and corresponds to the antimicrobial, e.g. antibiotic, drug(s) that correlate(s) with the mutations. Once these antimicrobial drugs, e.g. antibiotics, are ruled out, the remaining antimicrobial drugs, e.g. antibiotic drugs/antibiotics, can be selected in step d) as being suitable for treatment.

[0087] In the description, references to the first and second aspect also apply to the 14^{th}, 15^{th}, 16^{th} and 17^{th} embodiment, referring to the same genes, unless clear from the context that they don't apply.

[0088] According to certain embodiments in the method of the first or second aspect, the Enterobacter species is Enterobacter aerogenes and at least a mutation in ST548_p8085, particularly in position 171368 with regard to reference genome NC_020181 as annotated at the NCBI, is determined. For such mutation, a particularly relevant correlation with antimicrobial drug, e.g. antibiotic, resistance could be determined. In particular, the mutation in position 171368 with regard to reference genome NC_020181 as annotated at the NCBI is a non-synonymous coding, particularly a codon change aTc/aCc.

[0089] According to certain embodiments in the method of the first or second aspect, the Enterobacter species is Enterobacter cloacae and at least a mutation in ENC_39630 and/or ENC_32540, particularly ENC_39630, particularly in position 4019444 and/or 3290230, particularly in position 4019444, respectively, with regard to reference genome NC_021046 as annotated at the NCBI, is determined. For such mutations, a particularly relevant correlation with antimicrobial drug, e.g. antibiotic, resistance could be determined. In particular, the mutation in positions 4019444 and 3290230 with regard to reference genome NC_021046 as annotated at the NCBI are non-synonymous codings, particularly codon changes tCc/tTc;tCc/tAc and aGc/aTc, respectively.

[0090] According to certain embodiments, the antimicrobial drug, e.g. antibiotic, in the method of the first or second aspect, as well as in the other methods of the invention, is at least one selected from the group of β-lactams, β-lactam inhibitors, quinolines and derivatives thereof, aminoglycosides, polyketides, respectively tetracyclines, and folate synthesis inhibitors.

[0091] In the methods of the invention the resistance of Enterobacter, particularly Enterobacter aerogenes and/or Enterobacter cloacae, to one or more antimicrobial, e.g. antibiotic, drugs can be determined according to certain embodiments.

[0092] According to certain embodiments of the first and/or second aspect of the invention the antimicrobial, e.g. antibiotic, drug is selected from lactam antibiotics and the presence of a mutation in the following genes is determined: ENC_39630, ENC_32540, ENC_20090, ENC_34110, ENC_19160, ENC_00130, ENC_39120, ENC_23520, ENC_34890, ENC_01640, ENC_01700, ENC_12700, ENC_07150, ENC_18520, ENC_03650, ENC_03660, ENC_09780, ENC_18300, ENC_21490, ENC_42450, ENC_45970, ENC_06960, ENC_42440, ENC_44970, ENC_15210, ENC_16040, ENC_18950, ENC_34310, ENC_04740, ENC_26480, ENC_04560, ENC_21110, ENC_17620, ENC_15900, ENC_18290, ENC_26190, ENC_28140, ENC_42910, ENC_04700, ENC_29120, ENC_08830, ENC_33440, ENC_18400, ENC_32020, ENC_42660, ENC_13620, ENC_25610, ENC_02110, ENC_02570, and/or ENC_06620, preferably ENC_20090, ENC_34110, ENC_19160, ENC_00130, ENC_39120, ENC_23520, ENC_34890, ENC_01640, ENC_01700, ENC_12700, ENC_07150, ENC_18520, ENC_03650, ENC_03660, ENC_09780, ENC_18300, ENC_21490, ENC_42450, ENC_45970, ENC_06960, ENC_42440, ENC_44970, ENC_15210, ENC_16040, ENC_18950, ENC_34310, ENC_04740, ENC_26480, ENC_04560, ENC_21110, ENC_17620, ENC_15900, ENC_18290, ENC_26190, ENC_28140, ENC_42910, ENC_04700, ENC_29120, ENC_08830, ENC_33440, ENC_18400, ENC_32020, ENC_42660, ENC_13620, ENC_25610, ENC_02110, ENC_02570, and/or ENC_06620, or ENC_39630, ENC_32540, ENC_20090, and/or ENC_46830, preferably ENC_20090, and/or ENC_46830.

[0093] According to certain embodiments of the first and/or second aspect of the invention resistance to Enterobacter cloacae is determined, the antimicrobial, e.g. antibiotic, drug is selected from lactam antibiotics and the presence of a mutation in the following genes is determined: ENC_39630, ENC_32540, ENC_20090, ENC_34110, ENC_19160, ENC_00130, ENC_39120, ENC_23520, ENC_34890, ENC_01640, ENC_01700, ENC_12700, ENC_07150, ENC_18520, ENC_03650, ENC_03660, ENC_09780, ENC_18300, ENC_21490, ENC_42450, ENC_45970, ENC_06960, ENC_42440, ENC_44970, ENC_15210, ENC_16040, ENC_18950, ENC_34310, ENC_04740, ENC_26480, ENC_04560, ENC_21110, ENC_17620, ENC_15900, ENC_18290, ENC_26190, ENC_28140, ENC_42910, ENC_04700, ENC_29120, ENC_08830, ENC_33440, ENC_18400, ENC_32020, ENC_42660, ENC_13620, ENC_25610, ENC_02110, ENC_02570, and/or ENC_06620, preferably ENC_20090, ENC_34110, ENC_19160, ENC_00130, ENC_39120, ENC_23520, ENC_34890, ENC_01640, ENC_01700, ENC_12700, ENC_07150, ENC_18520, ENC_03650, ENC_03660, ENC_09780, ENC_18300, ENC_21490, ENC_42450, ENC_45970, ENC_06960, ENC_42440, ENC_44970, ENC_15210, ENC_16040, ENC_18950, ENC_34310, ENC_04740, ENC_26480, ENC_04560, ENC_21110, ENC_17620, ENC_15900, ENC_18290, ENC_26190, ENC_28140, ENC_42910, ENC_04700, ENC_29120, ENC_08830, ENC_33440, ENC_18400, ENC_32020, ENC_42660, ENC_13620, ENC_25610, ENC_02110, ENC_02570, and/or ENC_06620, or ENC_39630, ENC_32540, ENC_20090, and/or ENC_46830, preferably ENC_20090, and/or ENC_46830.

[0094] According to certain embodiments of the first and/or second aspect of the invention the antimicrobial, e.g. antibiotic, drug is selected from quinolone antibiotics, preferably fluoroquinolone antibiotics, and the presence of a mutation in the following genes is determined: ST548_p8085, ST548_p3778, ST548_p5387, ST548_p7737, ST548_p7940, ST548_p7919, ST548_p7543, ST548_p7426, ST548_p7336, ST548_p7239, ST548_p6918, ST548_p6844, ST548_p6794, ST548_p6618, ST548_p6494, ST548_p6478, ST548_p6451, ST548_p6386, ST548_p6367, ST548_p6066, ST548_p5966, ST548_p5904, ST548_p5779, ST548_p5658, ST548_p5474, ST548_p5447, ST548_p5300, ST548_p5259, ST548_p5115, ST548_p5081, ST548_p4891, ST548_p4836, ST548_p4577, ST548_p4310, ST548_p4203, ST548_p4107, ST548_p3593, ST548_p3452, ST548_p7944, ST548_p3464, ST548_p7296, ST548_p5257, ST548_p4364, ST548_p4137, ST548_p4611, ST548_p4841, ST548_p7855, ST548_p7086, ST548_p6814, and/or ST548_p5341, preferably ST548_p5387, ST548_p7737, ST548_p7940, ST548_p7919, ST548_p7543, ST548_p7426, ST548_p7336, ST548_p7239, ST548_p6918, ST548_p6844, ST548_p6794, ST548_p6618, ST548_p6494, ST548_p6478, ST548_p6451, ST548_p6386, ST548_p6367, ST548_p6066, ST548_p5966, ST548_p5904, ST548_p5779, ST548_p5658, ST548_p5474, ST548_p5447, ST548_p5300, ST548_p5259, ST548_p5115, ST548_p5081, ST548_p4891, ST548_p4836, ST548_p4577, ST548_p4310, ST548_p4203, ST548_p4107, ST548_p3593, ST548_p3452, ST548_p7944, ST548_p3464, ST548_p7296, ST548_p5257, ST548_p4364, ST548_p4137, ST548_p4611, ST548_p4841, ST548_p7855, ST548_p7086, ST548_p6814, and/or ST548_p5341; and/or ENC_39630 and/or ENC_32540,

or ST548_p8085, ST548_p3778, ST548_p5387, ST548_p7737, ST548_p5658, and/or ST548_p4310, preferably ST548_p5387, ST548_p7737, ST548_p5658, and/or ST548_p4310; and/or ENC_39630, ENC_32540, ENC_44710, ENC_37880, ENC_04160, ENC_26410, ENC_05800, ENC_43540, ENC_38400, and/or ENC_30490, preferably ENC_44710, ENC_37880, ENC_04160, ENC_26410, ENC_05800, ENC_43540, ENC_38400, and/or ENC_30490.

[0095] According to certain embodiments of the first and/or second aspect of the invention resistance to Enterobacter aerogenes is determined, the antimicrobial, e.g. antibiotic, drug is selected from quinolone antibiotics, preferably fluoroquinolone antibiotics, and the presence of a mutation in the following genes is determined: ST548_p8085, ST548_p3778, ST548_p5387, ST548_p7737, ST548_p7940, ST548_p7919, ST548_p7543, ST548_p7426, ST548_p7336, ST548_p7239, ST548_p6918, ST548_p6844, ST548_p6794, ST548_p6618, ST548_p6494, ST548_p6478, ST548_p6451, ST548_p6386, ST548_p6367, ST548_p6066, ST548_p5966, ST548_p5904, ST548_p5779, ST548_p5658, ST548_p5474, ST548_p5447, ST548_p5300, ST548_p5259, ST548_p5115, ST548_p5081, ST548_p4891, ST548_p4836, ST548_p4577, ST548_p4310, ST548_p4203, ST548_p4107, ST548_p3593, ST548_p3452, ST548_p7944, ST548_p3464, ST548_p7296, ST548_p5257, ST548_p4364, ST548_p4137, ST548_p4611, ST548_p4841, ST548_p7855, ST548_p7086, ST548_p6814, and/or ST548_p5341, preferably ST548_p5387, ST548_p7737, ST548_p7940, ST548_p7919, ST548_p7543, ST548_p7426, ST548_p7336, ST548_p7239, ST548_p6918, ST548_p6844, ST548_p6794, ST548_p6618, ST548_p6494, ST548_p6478, ST548_p6451, ST548_p6386, ST548_p6367, ST548_p6066, ST548_p5966, ST548_p5904, ST548_p5779, ST548_p5658, ST548_p5474, ST548_p5447, ST548_p5300, ST548_p5259, ST548_p5115, ST548_p5081, ST548_p4891, ST548_p4836, ST548_p4577, ST548_p4310, ST548_p4203, ST548_p4107, ST548_p3593, ST548_p3452, ST548_p7944, ST548_p3464, ST548_p7296, ST548_p5257, ST548_p4364, ST548_p4137, ST548_p4611, ST548_p4841, ST548_p7855, ST548_p7086, ST548_p6814, and/or ST548_p5341, or ST548_p8085, ST548_p3778, ST548_p5387, ST548_p7737, ST548_p5658, and/or ST548_p4310, preferably ST548_p5387, ST548_p7737, ST548_p5658, and/or ST548_p4310.

[0096] According to certain embodiments of the first and/or second aspect of the invention resistance to Enterobacter cloacae is determined, the antimicrobial, e.g. antibiotic, drug is selected from quinolone antibiotics, preferably fluoroquinolone antibiotics, and the presence of a mutation in the following genes is determined: ENC_39630 and/or ENC_32540, or ENC_39630, ENC_32540, ENC_44710, ENC_37880, ENC_04160, ENC_26410, ENC_05800, ENC_43540, ENC_38400, and/or ENC_30490, preferably ENC_44710, ENC_37880, ENC_04160, ENC_26410, ENC_05800, ENC_43540, ENC_38400, and/or ENC_30490.

[0097] According to certain embodiments of the first and/or second aspect of the invention the antimicrobial, e.g. antibiotic, drug is selected from aminoglycoside antibiotics and the presence of a mutation in the following genes is determined: ST548_p8085, ST548_p5387, ST548_p7737, ST548_p7940, ST548_p7919, ST548_p7543, ST548_p7426, ST548_p7336, ST548_p7239, ST548_p6918, ST548_p6844, ST548_p6794, ST548_p6618, ST548_p6494, ST548_p6478, ST548_p6451, ST548_p6386, ST548_p6367, ST548_p6066, ST548_p5966, ST548_p5904, ST548_p5779, ST548_p5658, ST548_p5474, ST548_p5447, ST548_p5300, ST548_p5259, ST548_p5115, ST548_p5081, ST548_p4891, ST548_p4836, ST548_p4577, ST548_p4310, ST548_p4203, ST548_p4107, ST548_p3593, ST548_p3452, ST548_p7944, ST548_p3464, ST548_p7296, ST548_p5257, ST548_p4364, ST548_p4137, ST548_p4611, ST548_p4841, ST548_p7855, ST548_p7086, ST548_p6814, and/or ST548_p5341, preferably ST548_p5387, ST548_p7737, ST548_p7940, ST548_p7919, ST548_p7543, ST548_p7426, ST548_p7336, ST548_p7239, ST548_p6918, ST548_p6844, ST548_p6794, ST548_p6618, ST548_p6494, ST548_p6478, ST548_p6451, ST548_p6386, ST548_p6367, ST548_p6066, ST548_p5966, ST548_p5904, ST548_p5779, ST548_p5658, ST548_p5474, ST548_p5447, ST548_p5300, ST548_p5259, ST548_p5115, ST548_p5081, ST548_p4891, ST548_p4836, ST548_p4577, ST548_p4310, ST548_p4203, ST548_p4107, ST548_p3593, ST548_p3452, ST548_p7944, ST548_p3464, ST548_p7296, ST548_p5257, ST548_p4364, ST548_p4137, ST548_p4611, ST548_p4841, ST548_p7855, ST548_p7086, ST548_p6814, and/or ST548_p5341; and/or ENC_39630 and/or ENC_32540, or ST548_p8085, ST548_p5387, ST548_p7737, ST548_p5658, and/or ST548_p4310, preferably ST548_p5387, ST548_p7737, ST548_p5658, and/or ST548_p4310; and/or ENC_39630, ENC_32540, and/or ENC_44710, preferably ENC_44710.

[0098] According to certain embodiments of the first and/or second aspect of the invention resistance to Enterobacter aerogenes is determined, the antimicrobial, e.g. antibiotic, drug is selected from aminoglycoside antibiotics and the presence of a mutation in the following genes is determined: ST548_p8085, ST548_p5387, ST548_p7737, ST548_p7940, ST548_p7919, ST548_p7543, ST548_p7426, ST548_p7336, ST548_p7239, ST548_p6918, ST548_p6844, ST548_p6794, ST548_p6618, ST548_p6494, ST548_p6478, ST548_p6451, ST548_p6386, ST548_p6367, ST548_p6066, ST548_p5966, ST548_p5904, ST548_p5779, ST548_p5658, ST548_p5474, ST548_p5447, ST548_p5300, ST548_p5259, ST548_p5115, ST548_p5081, ST548_p4891, ST548_p4836, ST548_p4577, ST548_p4310, ST548_p4203, ST548_p4107, ST548_p3593, ST548_p3452, ST548_p7944, ST548_p3464, ST548_p7296, ST548_p5257, ST548_p4364, ST548_p4137, ST548_p4611, ST548_p4841, ST548_p7855, ST548_p7086, ST548_p6814, and/or ST548_p5341, preferably ST548_p5387, ST548_p7737, ST548_p7940, ST548_p7919, ST548_p7543, ST548_p7426, ST548_p7336, ST548_p7239, ST548_p6918, ST548_p6844, ST548_p6794, ST548_p6618, ST548_p6494, ST548_p6478, ST548_p6451, ST548_p6386, ST548_p6367, ST548_p6066, ST548_p5966, ST548_p5904, ST548_p5779, ST548_p5658, ST548_p5474, ST548_p5447, ST548_p5300, ST548_p5259, ST548_p5115, ST548_p5081, ST548_p4891, ST548_p4836, ST548_p4577, ST548_p4310, ST548_p4203, ST548_p4107, ST548_p3593, ST548_p3452, ST548_p7944, ST548_p3464, ST548_p7296, ST548_p5257, ST548_p4364, ST548_p4137, ST548_p4611, ST548_p4841, ST548_p7855, ST548_p7086, ST548_p6814, and/or ST548_p5341,

or ST548_p8085, ST548_p5387, ST548_p7737, ST548_p5658, and/or ST548_p4310, preferably ST548_p5387, ST548_p7737, ST548_p5658, and/or ST548_p4310.

[0099] According to certain embodiments of the first and/or second aspect of the invention resistance to Enterobacter cloacae is determined, the antimicrobial, e.g. antibiotic, drug is selected from aminoglycoside antibiotics and the presence of a mutation in the following genes is determined: ENC_39630 and/or ENC_32540, or ENC_39630, ENC_32540, and/or ENC_44710, preferably ENC_44710.

[0100] According to certain embodiments of the first and/or second aspect of the invention the antimicrobial, e.g. antibiotic, drug is selected from polyketide antibiotics, preferably tetracycline antibiotics, and the presence of a mutation in the following genes is determined: ENC_39630 and/or ENC_32540.

[0101] According to certain embodiments of the first and/or second aspect of the invention resistance to Enterobacter cloacae is determined, the antimicrobial, e.g. antibiotic, drug is selected from polyketide antibiotics, preferably tetracycline antibiotics, and the presence of a mutation in the following genes is determined: ENC_39630 and/or ENC_32540.

[0102] According to certain embodiments of the first and/or second aspect of the invention the antimicrobial, e.g. antibiotic, drug is selected from benzene derived/sulfonamide antibiotics, and the presence of a mutation in the following genes is determined: ST548_p8085; and/or ENC_39630.

[0103] According to certain embodiments of the first and/or second aspect of the invention resistance to Enterobacter aerogenes is determined, the antimicrobial, e.g. antibiotic, drug is selected from benzene derived/sulfonamide antibiotics, and the presence of a mutation in the following genes is determined: ST548_p8085.

[0104] According to certain embodiments of the first and/or second aspect of the invention resistance to Enterobacter cloacae is determined, the antimicrobial, e.g. antibiotic, drug is selected from benzene derived/sulfonamide antibiotics, and the presence of a mutation in the following genes is determined: ENC_39630.

[0105] According to certain embodiments, the antimicrobial drug is an antibiotic/antibiotic drug.

[0106] According to certain embodiments of the first and/or second aspect of the invention, determining the nucleic acid sequence information or the presence of a mutation comprises determining the presence of a single nucleotide at a single position in a gene. Thus the invention comprises methods wherein the presence of a single nucleotide polymorphism or mutation at a single nucleotide position is detected.

[0107] According to certain embodiments, the antibiotic drug in the methods of the present invention is selected from the group consisting of Amoxicillin/K Clavulanate (AUG), Ampicillin (AM), Aztreonam (AZT), Cefazolin (CFZ), Cefepime (CPE), Cefotaxime (CFT), Ceftazidime (CAZ), Ceftriaxone (CAX), Cefuroxime (CRM), Cephalotin (CF), Ciprofloxacin (CP), Ertapenem (ETP), Gentamicin (GM), Imipenem (IMP), Levofloxacin (LVX), Meropenem (MER), Piperacillin/Tazobactam (P/T), Ampicillin/Sulbactam (A/S), Tetracycline (TE), Tobramycin (TO), and Trimethoprim/Sulfamethoxazole (T/S).

[0108] The inventors have surprisingly found that mutations in certain genes are indicative not only for a resistance to one single antimicrobial, e.g. antibiotic, drug, but to groups containing several drugs.

[0109] According to certain embodiments of the first and/or second aspect of the invention, resistance to Enterobacter aerogenes is determined, the gene is from Table 1a, the antibiotic drug is selected from quinolone antibiotics, preferably fluoroquinolone antibiotics, and a mutation in at least one of the following genes is detected with regard to reference genome NC_020181: ST548_p8085, ST548_p3778, ST548_p5387, ST548_p7737, ST548_p7940, ST548_p7919, ST548_p7543, ST548_p7426, ST548_p7336, ST548_p7239, ST548_p6918, ST548_p6844, ST548_p6794, ST548_p6618, ST548_p6494, ST548_p6478, ST548_p6451, ST548_p6386, ST548_p6367, ST548_p6066, ST548_p5966, ST548_p5904, ST548_p5779, ST548_p5658, ST548_p5474, ST548_p5447, ST548_p5300, ST548_p5259, ST548_p5115, ST548_p5081, ST548_p4891, ST548_p4836, ST548_p4577, ST548_p4310, ST548_p4203, ST548_p4107, ST548_p3593, ST548_p3452, ST548_p7944, ST548_p3464, ST548_p7296, ST548_p5257, ST548_p4364, ST548_p4137, ST548_p4611, ST548_p4841, ST548_p7855, ST548_p7086, ST548_p6814, ST548_p5341, preferably ST548_p5387, ST548_p7737, ST548_p7940, ST548_p7919, ST548_p7543, ST548_p7426, ST548_p7336, ST548_p7239, ST548_p6918, ST548_p6844, ST548_p6794, ST548_p6618, ST548_p6494, ST548_p6478, ST548_p6451, ST548_p6386, ST548_p6367, ST548_p6066, ST548_p5966, ST548_p5904, ST548_p5779, ST548_p5658, ST548_p5474, ST548_p5447, ST548_p5300, ST548_p5259, ST548_p5115, ST548_p5081, ST548_p4891, ST548_p4836, ST548_p4577, ST548_p4310, ST548_p4203, ST548_p4107, ST548_p3593, ST548_p3452, ST548_p7944, ST548_p3464, ST548_p7296, ST548_p5257, ST548_p4364, ST548_p4137, ST548_p4611, ST548_p4841, ST548_p7855, ST548_p7086, ST548_p6814, ST548_p5341.

[0110] According to certain embodiments of the first and/or second aspect of the invention, resistance to Enterobacter aerogenes is determined, the gene is from Table 1a, the antibiotic drug is selected from aminoglycoside antibiotics, and a mutation in at least one of the following genes is detected with regard to reference genome NC_020181: ST548_p8085, ST548_p5387, ST548_p7737, ST548_p7940, ST548_p7919, ST548_p7543, ST548_p7426, ST548_p7336, ST548_p7239, ST548_p6918, ST548_p6844, ST548_p6794, ST548_p6618, ST548_p6494, ST548_p6478, ST548_p6451, ST548_p6386, ST548_p6367, ST548_p6066, ST548_p5966, ST548_p5904, ST548_p5779, ST548_p5658, ST548_p5474, ST548_p5447, ST548_p5300, ST548_p5259, ST548_p5115, ST548_p5081, ST548_p4891, ST548_p4836, ST548_p4577, ST548_p4310, ST548_p4203, ST548_p4107, ST548_p3593, ST548_p3452, ST548_p7944, ST548_p3464, ST548_p7296, ST548_p5257, ST548_p4364, ST548_p4137, ST548_p4611, ST548_p4841, ST548_p7855, ST548_p7086, ST548_p6814, ST548_p5341, preferably ST548_p5387, ST548_p7737, ST548_p7940, ST548_p7919, ST548_p7543, ST548_p7426, ST548_p7336, ST548_p7239, ST548_p6918, ST548_p6844, ST548_p6794, ST548_p6618, ST548_p6494, ST548_p6478, ST548_p6451, ST548_p6386, ST548_p6367, ST548_p6066, ST548_p5966, ST548_p5904, ST548_p5779, ST548_p5658, ST548_p5474, ST548_p5447, ST548_p5300, ST548_p5259, ST548_p5115, ST548_p5081, ST548_p4891, ST548_p4836, ST548_p4577, ST548_p4310, ST548_p4203, ST548_p4107, ST548_p3593, ST548_p3452, ST548_p7944, ST548_p3464, ST548_p7296, ST548_p5257, ST548_p4364, ST548_p4137, ST548_p4611, ST548_p4841, ST548_p7855, ST548_p7086, ST548_p6814, ST548_p5341.

[0111] According to certain embodiments of the first and/or second aspect of the invention, resistance to Enterobacter aerogenes is determined, the gene is from Table 1a, the antibiotic drug is selected from benzene derived/sulfonamide antibiotics, and a mutation in at least one of the following genes is detected with regard to reference genome NC_020181: ST548_p8085.

[0112] According to certain embodiments of the first and/or second aspect of the invention, resistance to Enterobacter cloacae is determined, the gene is from Table 1b, the antibiotic drug is selected from lactam antibiotics, and a mutation in at least one of the following genes is detected with regard to reference genome NC_021046: ENC_39630, ENC_32540, ENC_20090, ENC_34110, ENC_19160, ENC_00130, ENC_39120, ENC_23520, ENC_34890, ENC_01640, ENC_01700, ENC_12700, ENC_07150, ENC_18520, ENC_03650, ENC_03660, ENC_09780, ENC_18300, ENC_21490, ENC_42450, ENC_45970, ENC_06960, ENC_42440, ENC_44970, ENC_15210, ENC_16040, ENC_18950, ENC_34310, ENC_04740, ENC_26480, ENC_04560, ENC_21110, ENC_17620, ENC_15900, ENC_18290, ENC_26190, ENC_28140, ENC_42910, ENC_04700, ENC_29120, ENC_08830, ENC_33440, ENC_18400, ENC_32020, ENC_42660, ENC_13620, ENC_25610, ENC_02110, ENC_02570, ENC_06620, preferably ENC_20090, ENC_34110, ENC_19160, ENC_00130, ENC_39120, ENC_23520, ENC_34890, ENC_01640, ENC_01700, ENC_12700, ENC_07150, ENC_18520, ENC_03650, ENC_03660, ENC_09780, ENC_18300, ENC_21490, ENC_42450, ENC_45970, ENC_06960, ENC_42440, ENC_44970, ENC_15210, ENC_16040, ENC_18950, ENC_34310, ENC_04740, ENC_26480, ENC_04560, ENC_21110, ENC_17620, ENC_15900, ENC_18290, ENC_26190, ENC_28140, ENC_42910, ENC_04700, ENC_29120, ENC_08830, ENC_33440, ENC_18400, ENC_32020, ENC_42660, ENC_13620, ENC_25610, ENC_02110, ENC_02570, ENC_06620.

[0113] According to certain embodiments of the first and/or second aspect of the invention, resistance to Enterobacter cloacae is determined, the gene is from Table 1b, the antibiotic drug is selected from quinolone antibiotics, preferably fluoroquinolone antibiotics, and/or aminoglycoside antibiotics, and/or polyketide antibiotics, preferably tetracycline antibiotics, and a mutation in at least one of the following genes is detected with regard to reference genome NC_021046: ENC_39630, ENC_32540.

[0114] According to certain embodiments of the first and/or second aspect of the invention, resistance to Enterobacter cloacae is determined, the gene is from Table 1b, the antibiotic drug is selected from benzene derived/sulfonamide antibiotics, and a mutation in at least one of the following genes is detected with regard to reference genome NC_021046: ENC_39630.

[0115] According to certain embodiments of the first and/or second aspect of the invention, resistance to Enterobacter aerogenes is determined, the gene is from Table 2a, the antibiotic drug is selected from quinolone antibiotics, preferably fluoroquinolone antibiotics, and a mutation in at least one of the following genes is detected with regard to reference genome NC_020181: ST548_p8085, ST548_p3778, ST548_p5387, ST548_p7737, ST548_p5658, ST548_p4310, preferably ST548_p5387, ST548_p7737, ST548_p5658, ST548_p4310.

[0116] According to certain embodiments of the first and/or second aspect of the invention, resistance to Enterobacter aerogenes is determined, the gene is from Table 2a, the antibiotic drug is selected from aminoglycoside antibiotics, and a mutation in at least one of the following genes is detected with regard to reference genome NC_020181: ST548_p8085, ST548_p5387, ST548_p7737, ST548_p5658, ST548_p4310, preferably ST548_p5387, ST548_p7737, ST548_p5658, ST548_p4310.

[0117] According to certain embodiments of the first and/or second aspect of the invention, resistance to Enterobacter aerogenes is determined, the gene is from Table 2a, the antibiotic drug is selected from benzene derived/sulfonamide antibiotics, and a mutation in at least one of the following genes is detected with regard to reference genome NC_020181: ST548_p8085.

[0118] According to certain embodiments of the first and/or second aspect of the invention, resistance to Enterobacter cloacae is determined, the gene is from Table 2b, the antibiotic drug is selected from lactam antibiotics, and a mutation in at least one of the following genes is detected with regard to reference genome NC_021046: ENC_39630, ENC_32540, ENC_20090, ENC_46830, preferably ENC_20090, ENC_46830.

[0119] According to certain embodiments of the first and/or second aspect of the invention, resistance to Enterobacter cloacae is determined, the gene is from Table 2b, the antibiotic drug is selected from quinolone antibiotics, preferably fluoroquinolone antibiotics, and a mutation in at least one of the following genes is detected with regard to reference genome NC_021046: ENC_39630, ENC_32540, ENC_44710, ENC_37880, ENC_04160, ENC_26410, ENC_05800, ENC_43540, ENC_38400, ENC_30490, preferably ENC_44710, ENC_37880, ENC_04160, ENC_26410, ENC_05800, ENC_43540, ENC_38400, ENC_30490.

[0120] According to certain embodiments of the first and/or second aspect of the invention, resistance to Enterobacter cloacae is determined, the gene is from Table 2b, the antibiotic drug is selected from aminoglycoside antibiotics, and a mutation in at least one of the following genes is detected with regard to reference genome NC_021046: ENC_39630, ENC_32540, ENC_44710, preferably ENC_44710.

[0121] According to certain embodiments of the first and/or second aspect of the invention, resistance to Enterobacter cloacae is determined, the gene is from Table 2b, the antibiotic drug is selected from polyketide antibiotics, preferably tetracycline antibiotics, and a mutation in at least one of the following genes is detected with regard to reference genome NC_021046: ENC_39630, ENC_32540.

[0122] According to certain embodiments of the first and/or second aspect of the invention, resistance to Enterobacter cloacae is determined, the gene is from Table 2b, the antibiotic drug is selected from benzene derived/sulfonamide antibiotics, and a mutation in at least one of the following genes is detected with regard to reference genome NC_021046: ENC_39630.

[0123] For specific antimicrobial drugs, e.g. antibiotics, specific positions in the above genes can be determined where a high statistical significance is observed. The inventors found that, apart from the above genes indicative of a resistance against antibiotics, also single nucleotide polymorphisms (=SNP's) may have a high significance for the presence of a resistance against defined antibiotic drugs. The analysis of these polymorphisms on a nucleotide level may further improve and accelerate the determination of a drug resistance to antimicrobial drugs, e.g. antibiotics, in Enterobacter, particularly Enterobacter aerogenes and/or Enterobacter cloacae.

[0124] According to certain embodiments of the first and/or second aspect of the invention, resistance to Enterobacter aerogenes is determined, the gene is from Table 1a, the antibiotic drug is selected from quinolone antibiotics, preferably fluoroquinolone antibiotics, and a mutation in at least one of the following nucleotide positions is detected with regard to reference genome NC_020181: 171368, 4648161, 2963787, 578343, 308760, 330342, 759640, 875320, 968582, 968583, 1075621, 1388768, 1456507, 1510620, 1688528, 1814445, 1828376, 1854623, 1923797, 1941154, 2270128, 2371346, 2430827, 2565704, 2685678, 2869308, 2895550, 3058970, 3109785, 3260880, 3294397, 3487655, 3548030, 3832969, 4106378, 4230886, 4332930, 4831706, 4982236, 303522, 4964839, 1013168, 3112563, 4048371, 4295968, 3790746, 3542747, 407759, 1229270, 1487307, 3014838, preferably 2963787, 578343, 308760, 330342, 759640, 875320, 968582, 968583, 1075621, 1388768, 1456507, 1510620, 1688528, 1814445, 1828376, 1854623, 1923797, 1941154, 2270128, 2371346, 2430827, 2565704, 2685678, 2869308, 2895550, 3058970, 3109785, 3260880, 3294397, 3487655, 3548030, 3832969, 4106378, 4230886, 4332930, 4831706, 4982236, 303522, 4964839, 1013168, 3112563, 4048371, 4295968, 3790746, 3542747, 407759, 1229270, 1487307, 3014838.

[0125] According to certain embodiments of the first and/or second aspect of the invention, resistance to Enterobacter aerogenes is determined, the gene is from Table 1a, the antibiotic drug is selected from aminoglycoside antibiotics, and a mutation in at least one of the following nucleotide positions is detected with regard to reference genome NC_020181: 171368, 2963787, 578343, 308760, 330342, 759640, 875320, 968582, 968583, 1075621, 1388768, 1456507, 1510620, 1688528, 1814445, 1828376, 1854623, 1923797, 1941154, 2270128, 2371346, 2430827, 2565704, 2685678, 2869308, 2895550, 3058970, 3109785, 3260880, 3294397, 3487655, 3548030, 3832969, 4106378, 4230886, 4332930, 4831706, 4982236, 303522, 4964839, 1013168, 3112563, 4048371, 4295968, 3790746, 3542747, 407759, 1229270, 1487307, 3014838, preferably 2963787, 578343, 308760, 330342, 759640, 875320, 968582, 968583, 1075621, 1388768, 1456507, 1510620, 1688528, 1814445, 1828376, 1854623, 1923797, 1941154, 2270128, 2371346, 2430827, 2565704, 2685678, 2869308, 2895550, 3058970, 3109785, 3260880, 3294397, 3487655, 3548030, 3832969, 4106378, 4230886, 4332930, 4831706, 4982236, 303522, 4964839, 1013168, 3112563, 4048371, 4295968, 3790746, 3542747, 407759, 1229270, 1487307, 3014838.

[0126] According to certain embodiments of the first and/or second aspect of the invention, resistance to Enterobacter aerogenes is determined, the gene is from Table 1a, the antibiotic drug is selected from benzene derived/sulfonamide antibiotics, and a mutation in at least one of the following nucleotide positions is detected with regard to reference genome NC_020181: 171368.

[0127] According to certain embodiments of the first and/or second aspect of the invention, resistance to Enterobacter cloacae is determined, the gene is from Table 1b, the antibiotic drug is selected from lactam antibiotics, and a mutation in at least one of the following nucleotide positions is detected with regard to reference genome NC_021046: 4019444, 3290230, 2054358, 2054359, 3460705, 1963119, 1694, 3960409, 2398200, 3537025, 173905, 178991, 1333048, 746244, 1892158, 383581, 384468, 1030349, 1872389, 2195955, 4326453, 4693856, 725344, 4325136, 4580729, 1567468, 4326252, 1648963, 1935940, 3478558, 503770, 2682222, 482161, 2157120, 1796041, 4325190, 1635457, 1871996, 1872000, 2647657, 2844012, 4371994, 499197, 2939786, 928430, 3385544, 1882721, 3231503, 4347833, 1415838, 2585931, 222650, 268130, 691829, preferably 2054358, 2054359, 3460705, 1963119, 1694, 3960409, 2398200, 3537025, 173905, 178991, 1333048, 746244, 1892158, 383581, 384468, 1030349, 1872389, 2195955, 4326453, 4693856, 725344, 4325136, 4580729, 1567468, 4326252, 1648963, 1935940, 3478558, 503770, 2682222, 482161, 2157120, 1796041, 4325190, 1635457, 1871996, 1872000, 2647657, 2844012, 4371994, 499197, 2939786, 928430, 3385544, 1882721, 3231503, 4347833, 1415838, 2585931, 222650, 268130, 691829.

[0128] According to certain embodiments of the first and/or second aspect of the invention, resistance to Enterobacter cloacae is determined, the gene is from Table 1b, the antibiotic drug is selected from quinolone antibiotics, preferably fluoroquinolone antibiotics, and/or aminoglycoside antibiotics, and/or polyketide antibiotics, preferably tetracycline anti-biotics, and a mutation in at least one of the following nucleotide positions is detected with regard to reference genome NC_021046: 4019444, 3290230.

[0129] According to certain embodiments of the first and/or second aspect of the invention, resistance to Enterobacter cloacae is determined, the gene is from Table 1b, the antibiotic drug is selected from benzene derived/sulfonamide antibiotics, and a mutation in at least one of the following nucleotide positions is detected with regard to reference genome NC_021046: 4019444.

[0130] According to certain embodiments of the first and/or second aspect of the invention, resistance to Enterobacter aerogenes is determined, the gene is from Table 2a, the antibiotic drug is selected from quinolone antibiotics, preferably fluoroquinolone antibiotics, and a mutation in at least one of the following nucleotide positions is detected with regard to reference genome NC_020181:171368, 4648161, 2963787, 578343, 2685678, 4106378, preferably 2963787, 578343, 2685678, 4106378.

[0131] According to certain embodiments of the first and/or second aspect of the invention, resistance to Enterobacter aerogenes is determined, the gene is from Table 2a, the antibiotic drug is selected from aminoglycoside antibiotics, and a mutation in at least one of the following nucleotide positions is detected with regard to reference genome NC_020181:171368, 2963787, 578343, 2685678, 4106378, preferably 2963787, 578343, 2685678, 4106378.

[0132] According to certain embodiments of the first and/or second aspect of the invention, resistance to Enterobacter aerogenes is determined, the gene is from Table 2a, the antibiotic drug is selected from benzene derived/sulfonamide antibiotics, and a mutation in at least one of the following nucleotide positions is detected with regard to reference genome NC_020181: 171368.

[0133] According to certain embodiments of the first and/or second aspect of the invention, resistance to Enterobacter cloacae is determined, the gene is from Table 2b, the antibiotic drug is selected from lactam antibiotics, and a mutation in at least one of the following nucleotide positions is detected with regard to reference genome NC_021046: 4019444, 3290230, 2054358, 4791743, preferably 2054358, 4791743.

[0134] According to certain embodiments of the first and/or second aspect of the invention, resistance to Enterobacter cloacae is determined, the gene is from Table 2b, the antibiotic drug is selected from quinolone antibiotics, particularly fluoroquinolone antibiotics, and a mutation in at least one of the following nucleotide positions is detected with regard to reference genome NC_021046: 4019444, 3290230, 4557569, 3833518, 438917, 2674813, 611929, 4428726, 3888032, 3076462, preferably 4557569, 3833518, 438917, 2674813, 611929, 4428726, 3888032, 3076462.

[0135] According to certain embodiments of the first and/or second aspect of the invention, resistance to Enterobacter cloacae is determined, the gene is from Table 2b, the antibiotic drug is selected from aminoglycoside antibiotics, and a mutation in at least one of the following nucleotide positions is detected with regard to reference genome NC_021046:4019444, 3290230, 4557569, preferably 4557569.

[0136] According to certain embodiments of the first and/or second aspect of the invention, resistance to Enterobacter cloacae is determined, the gene is from Table 2b, the antibiotic drug is selected from polyketide antibiotics, preferably tetracycline antibiotics, and a mutation in at least one of the following nucleotide positions is detected with regard to reference genome NC_021046:4019444, 3290230.

[0137] According to certain embodiments of the first and/or second aspect of the invention, resistance to Enterobacter cloacae is determined, the gene is from Table 2b, the antibiotic drug is selected from benzene derived/sulfonamide antibiotics, and a mutation in at least one of the following nucleotide positions is detected with regard to reference genome NC_021046: 4019444.

[0138] According to certain embodiments of the first and/or second aspect of the invention, resistance to Enterobacter aerogenes is determined, the antibiotic drug is at least one of CP and LVX and a mutation in at least one of the following nucleotide positions is detected with regard to reference genome NC_020181: 171368, 4648161, 2963787, 578343, 2685678, 4106378, preferably 2963787, 578343, 2685678, 4106378.

[0139] According to certain embodiments of the first and/or second aspect of the invention, resistance to Enterobacter aerogenes is determined, the antibiotic drug is TO and a mutation in at least one of the following nucleotide positions is detected with regard to reference genome NC_020181: 171368, 2963787, 578343, 2685678, 4106378, preferably 2963787, 578343, 2685678, 4106378.

[0140] According to certain embodiments of the first and/or second aspect of the invention, resistance to Enterobacter aerogenes is determined, the antibiotic drug is T/S and a mutation in at least one of the following nucleotide positions is detected with regard to reference genome NC_020181: 171368.

[0141] According to certain embodiments of the first and/or second aspect of the invention, resistance to Enterobacter cloacae is determined, the antibiotic drug is CPE and a mutation in at least one of the following nucleotide positions is detected with regard to reference genome NC_021046: 4019444, 3290230, 2054358, 4791743, preferably 2054358, 4791743.

[0142] According to certain embodiments of the first and/or second aspect of the invention, resistance to Enterobacter cloacae is determined, the antibiotic drug is at least one of CAZ, CFT, P/T and CAX, and a mutation in at least one of the following nucleotide positions is detected with regard to reference genome NC_021046: 4019444, 2054358, 4791743, preferably 2054358, 4791743.

[0143] According to certain embodiments of the first and/or second aspect of the invention, resistance to Enterobacter cloacae is determined, the antibiotic drug is at least one of CRM, ETP and AZT, and a mutation in at least one of the following nucleotide positions is detected with regard to reference genome NC_021046: 4019444.

[0144] According to certain embodiments of the first and/or second aspect of the invention, resistance to Enterobacter cloacae is determined, the antibiotic drug is at least one of CP and LVX, and a mutation in at least one of the following nucleotide positions is detected with regard to reference genome NC_021046: 4019444, 3290230, 4557569, 3833518, 438917, 2674813, 611929, 4428726, 3888032, 3076462, preferably 4557569, 3833518, 438917, 2674813, 611929, 4428726, 3888032, 3076462.

[0145] According to certain embodiments of the first and/or second aspect of the invention, resistance to Enterobacter cloacae is determined, the antibiotic drug is GM, and a mutation in at least one of the following nucleotide positions is detected with regard to reference genome NC_021046: 4019444, 3290230.

[0146] According to certain embodiments of the first and/or second aspect of the invention, resistance to Enterobacter cloacae is determined, the antibiotic drug is TO, and a mutation in at least one of the following nucleotide positions is detected with regard to reference genome NC_021046: 4019444, 4557569, preferably 4557569.

[0147] According to certain embodiments of the first and/or second aspect of the invention, resistance to Enterobacter cloacae is determined, the antibiotic drug is TE, and a mutation in at least one of the following nucleotide positions is detected with regard to reference genome NC_021046: 4019444, 3290230.

[0148] According to certain embodiments of the first and/or second aspect of the invention, resistance to Enterobacter cloacae is determined, the antibiotic drug is T/S, and a mutation in at least one of the following nucleotide positions is detected with regard to reference genome NC_021046: 4019444.

[0149] Although the genes and gene positions with regard to the antibiotic classes and the specific antibiotics have been described above separately for the two reference genomes for the sake of brevity, also the results from the different list for the same antibiotic classes and/or the specific antibiotics can be combined according to certain embodiments of the invention.

[0150] According to certain embodiments of the first and/or second aspect of the invention, the resistance of a bacterial microorganism belonging to the species Enterobacter, particularly Enterobacter aerogenes and/or Enterobacter cloacae, against 1, 2, 3, 4, 5, 6, 7, 8, 9, 10, 11, 12, 13, 14, 15 or 16, 17, 18, 19, 20 or 21 antibiotic drugs is determined.

[0151] According to certain embodiments of the first and/or second aspect of the invention, a detected mutation is a mutation leading to an altered amino acid sequence in a polypeptide derived from a respective gene in which the detected mutation is located. According to this aspect, the detected mutation thus leads to a truncated version of the polypeptide (wherein a new stop codon is created by the mutation) or a mutated version of the polypeptide having an amino acid exchange at the respective position.

[0152] According to certain embodiments of the first and/or second aspect of the invention, determining the nucleic acid sequence information or the presence of a mutation comprises determining a partial sequence or an entire sequence of the at least two genes.

[0153] According to certain embodiments of the first and/or second aspect of the invention, determining the nucleic acid sequence information or the presence of a mutation comprises determining a partial or entire sequence of the genome of the Enterobacter species, particularly Enterobacter aerogenes and/or Enterobacter cloacae, wherein said partial or entire sequence of the genome comprises at least a partial sequence of said at least two genes.

[0154] According to certain embodiments of the first and/or second aspect of the invention, determining the nucleic acid sequence information or the presence of a mutation comprises using a next generation sequencing or high throughput sequencing method. According to preferred embodiments of the first and/or second aspect of the invention, a partial or entire genome sequence of the bacterial organism of Enterobacter species, particularly Enterobacter aerogenes and/or Enterobacter cloacae, is determined by using a next generation sequencing or high throughput sequencing method.

[0155] In a further, third aspect, the present invention relates to a method of determining an antimicrobial drug, e.g. antibiotic, resistance profile for bacterial microorganisms of Enterobacter species, particularly Enterobacter aerogenes and/or Enterobacter cloacae, comprising:

obtaining or providing a first data set of gene sequences of a plurality of clinical isolates of Enterobacter species, particularly Enterobacter aerogenes and/or Enterobacter cloacae;
providing a second data set of antimicrobial drug, e.g. antibiotic, resistance of the plurality of clinical isolates of Enterobacter species, particularly Enterobacter aerogenes and/or Enterobacter cloacae;
aligning the gene sequences of the first data set to at least one, preferably one or two, preferably one, reference genome(s) of Enterobacter, particularly Enterobacter aerogenes and/or Enterobacter cloacae, and/or assembling the gene sequence of the first data set, at least in part;
analyzing the gene sequences of the first data set for genetic variants to obtain a third data set of genetic variants; correlating the third data set with the second data set and statistically analyzing the correlation; and
determining the genetic sites in the genome of Enterobacter, particularly Enterobacter aerogenes and/or Enterobacter cloacae, associated with antimicrobial drug, e.g. antibiotic, resistance.

[0156] The different steps can be carried out as described with regard to the method of the first aspect of the present invention.

[0157] When referring to the second data set, wherein the second data set e.g. comprises, respectively is, a set of antimicrobial drug, e.g. antibiotic, resistances of a plurality of clinical isolates, this can, within the scope of the invention, also refer to a self-learning data base that, whenever a new sample is analyzed, can take this sample into the second data set and thus expand its data base. The second data set thus does not have to be static and can be expanded, either by external input or by incorporating new data due to self-learning. This is, however, not restricted to the third aspect of the invention, but applies to other aspects of the invention that refer to a second data set, which does not necessarily have to refer to antimicrobial drug resistance. The same applies, where applicable, to the first data set, e.g. in the third aspect.

[0158] According to certain embodiments, statistical analysis in the present methods is carried out using Fisher's test with p<10⁻⁶, preferably p<10⁻⁹, particularly p<10⁻¹⁰.

[0159] The method of the third aspect of the present invention, as well as related methods, e.g. according to the 7^{th} and 10^{th}, aspect, can, according to certain embodiments, comprise correlating different genetic sites to each other, e.g. in at least two, three, four, five, six, seven, eight, nine or ten genes. This way even higher statistical significance can be achieved.

[0160] According to certain embodiments of the method of the third aspect and related methods—as above, the second data set is provided by culturing the clinical isolates of Enterobacter species, particularly Enterobacter aerogenes and/or Enterobacter cloacae, on agar plates provided with antimicrobial drugs, e.g. antibiotics, at different concentrations and the second data is obtained by taking the minimal concentration of the plates that inhibits growth of the respective Enterobacter species, particularly Enterobacter aerogenes and/or Enterobacter cloacae.

[0161] According to certain embodiments of the method of the third aspect and related methods, the antibiotic is at least one selected from the group of β-lactams, β-lactam inhibitors, quinolines and derivatives thereof, aminoglycosides, tetracyclines, and folate synthesis inhibitors, preferably Amoxicillin/K Clavulanate, Ampicillin, Aztreonam, Cefazolin, Cefepime, Cefotaxime, Ceftazidime, Ceftriaxone, Cefuroxime, Cephalothin, Ciprofloxacin, Ertapenem, Gentamicin, Imipenem, Levofloxacin, Meropenem, Piperacillin/Tazobactam, Ampicillin/Sulbactam, Tetracycline, Tobramycin, and Trimethoprim/Sulfamethoxazole.

[0162] According to certain embodiments of the method of the third aspect and related methods, the gene sequences in the third data set are comprised in at least one gene from the group of genes consisting of ST548_p8085, ST548_p3778, ST548_p5387, ST548_p7737, ST548_p7940, ST548_p7919, ST548_p7543, ST548_p7426, ST548_p7336, ST548_p7239, ST548_p6918, ST548_p6844, ST548_p6794, ST548_p6618, ST548_p6494, ST548_p6478, ST548_p6451, ST548_p6386, ST548_p6367, ST548_p6066, ST548_p5966, ST548_p5904, ST548_p5779, ST548_p5658, ST548_p5474, ST548_p5447, ST548_p5300, ST548_p5259, ST548_p5115, ST548_p5081, ST548_p4891, ST548_p4836, ST548_p4577, ST548_p4310, ST548_p4203, ST548_p4107, ST548_p3593, ST548_p3452, ST548_p7944, ST548_p3464, ST548_p7296, ST548_p5257, ST548_p4364, ST548_p4137, ST548_p4611, ST548_p4841, ST548_p7855, ST548_p7086, ST548_p6814, and ST548_p5341, preferably ST548_p5387, ST548_p7737, ST548_p7940, ST548_p7919, ST548_p7543, ST548_p7426, ST548_p7336, ST548_p7239, ST548_p6918, ST548_p6844, ST548_p6794, ST548_p6618, ST548_p6494, ST548_p6478, ST548_p6451, ST548_p6386, ST548_p6367, ST548_p6066, ST548_p5966, ST548_p5904, ST548_p5779, ST548_p5658, ST548_p5474, ST548_p5447, ST548_p5300, ST548_p5259, ST548_p5115, ST548_p5081, ST548_p4891, ST548_p4836, ST548_p4577, ST548_p4310, ST548_p4203, ST548_p4107, ST548_p3593, ST548_p3452, ST548_p7944, ST548_p3464, ST548_p7296, ST548_p5257, ST548_p4364, ST548_p4137, ST548_p4611, ST548_p4841, ST548_p7855, ST548_p7086, ST548_p6814, and ST548_p5341, and/or ENC_39630, ENC_32540, ENC_20090, ENC_34110, ENC_19160, ENC_00130, ENC_39120, ENC_23520, ENC_34890, ENC_01640, ENC_01700, ENC_12700, ENC_07150, ENC_18520, ENC_03650, ENC_03660, ENC_09780, ENC_18300, ENC_21490, ENC_42450, ENC_45970, ENC_06960, ENC_42440, ENC_44970, ENC_15210, ENC_16040, ENC_18950, ENC_34310, ENC_04740, ENC_26480, ENC_04560, ENC_21110, ENC_17620, ENC_15900, ENC_18290, ENC_26190, ENC_28140, ENC_42910, ENC_04700, ENC_29120, ENC_08830, ENC_33440, ENC_18400, ENC_32020, ENC_42660, ENC_13620, ENC_25610, ENC_02110, ENC_02570, and ENC_06620, preferably ENC_20090, ENC_34110, ENC_19160, ENC_00130, ENC_39120, ENC_23520, ENC_34890, ENC_01640, ENC_01700, ENC_12700, ENC_07150, ENC_18520, ENC_03650, ENC_03660, ENC_09780, ENC_18300, ENC_21490, ENC_42450, ENC_45970, ENC_06960, ENC_42440, ENC_44970, ENC_15210, ENC_16040, ENC_18950, ENC_34310, ENC_04740, ENC_26480, ENC_04560, ENC_21110, ENC_17620, ENC_15900, ENC_18290, ENC_26190, ENC_28140, ENC_42910, ENC_04700, ENC_29120, ENC_08830, ENC_33440, ENC_18400, ENC_32020, ENC_42660, ENC_13620, ENC_25610, ENC_02110, ENC_02570, and ENC_06620, or from the group of genes consisting of ST548_p8085, ST548_p3778, ST548_p5387, ST548_p7737, ST548_p5658, and ST548_p4310, preferably ST548_p5387, ST548_p7737, ST548_p5658, and ST548_p4310, and/or ENC_39630, ENC_32540, ENC_20090, ENC_44710, ENC_46830, ENC_37880, ENC_04160, ENC_26410, ENC_05800, ENC_43540, ENC_38400, and ENC_30490, preferably ENC_20090, ENC_44710, ENC_46830, ENC_37880, ENC_04160, ENC_26410, ENC_05800, ENC_43540, ENC_38400, and ENC_30490, or from the genes listed in Table 5a, preferably Table 5c, and/or Table 5b, preferably Table 5d.

[0163] According to certain embodiments of the method of the third aspect and related methods, an antimicrobial drug, e.g. antibiotic, resistance profile for bacterial microorganisms of Enterobacter aerogenes is determined and the gene sequences in the third data set are comprised in at least one gene from the group of genes consisting of ST548_p8085, ST548_p3778, ST548_p5387, ST548_p7737, ST548_p7940, ST548_p7919, ST548_p7543, ST548_p7426, ST548_p7336, ST548_p7239, ST548_p6918, ST548_p6844, ST548_p6794, ST548_p6618, ST548_p6494, ST548_p6478, ST548_p6451, ST548_p6386, ST548_p6367, ST548_p6066, ST548_p5966, ST548_p5904, ST548_p5779, ST548_p5658, ST548_p5474, ST548_p5447, ST548_p5300, ST548_p5259, ST548_p5115, ST548_p5081, ST548_p4891, ST548_p4836, ST548_p4577, ST548_p4310, ST548_p4203, ST548_p4107, ST548_p3593, ST548_p3452, ST548_p7944, ST548_p3464, ST548_p7296, ST548_p5257, ST548_p4364, ST548_p4137, ST548_p4611, ST548_p4841, ST548_p7855, ST548_p7086, ST548_p6814, and ST548_p5341, preferably ST548_p5387, ST548_p7737, ST548_p7940, ST548_p7919, ST548_p7543, ST548_p7426, ST548_p7336, ST548_p7239, ST548_p6918, ST548_p6844, ST548_p6794, ST548_p6618, ST548_p6494, ST548_p6478, ST548_p6451, ST548_p6386, ST548_p6367, ST548_p6066, ST548_p5966, ST548_p5904, ST548_p5779, ST548_p5658, ST548_p5474, ST548_p5447, ST548_p5300, ST548_p5259, ST548_p5115, ST548_p5081, ST548_p4891, ST548_p4836, ST548_p4577, ST548_p4310, ST548_p4203, ST548_p4107, ST548_p3593, ST548_p3452, ST548_p7944, ST548_p3464, ST548_p7296, ST548_p5257, ST548_p4364, ST548_p4137, ST548_p4611, ST548_p4841, ST548_p7855, ST548_p7086, ST548_p6814, and ST548_p5341, or from the group of genes consisting of ST548_p8085, ST548_p3778, ST548_p5387, ST548_p7737, ST548_p5658, and ST548_p4310, preferably ST548_p5387, ST548_p7737, ST548_p5658, and ST548_p4310, or from the genes listed in Table 5a, preferably in Table 5c.

[0164] According to certain embodiments of the method of the third aspect and related methods, an antimicrobial drug, e.g. antibiotic, resistance profile for bacterial microorganisms of Enterobacter cloacae is determined and the gene sequences in the third data set are comprised in at least one gene from the group of genes consisting of ENC_39630, ENC_32540, ENC_20090, ENC_34110, ENC_19160, ENC_00130, ENC_39120, ENC_23520, ENC_34890, ENC_01640, ENC_01700, ENC_12700, ENC_07150, ENC_18520, ENC_03650, ENC_03660, ENC_09780, ENC_18300, ENC_21490, ENC_42450, ENC_45970, ENC_06960, ENC_42440, ENC_44970, ENC_15210, ENC_16040, ENC_18950, ENC_34310, ENC_04740, ENC_26480, ENC_04560, ENC_21110, ENC_17620, ENC_15900, ENC_18290, ENC_26190, ENC_28140, ENC_42910, ENC_04700, ENC_29120, ENC_08830, ENC_33440, ENC_18400, ENC_32020, ENC_42660, ENC_13620, ENC_25610, ENC_02110, ENC_02570, and ENC_06620, preferably ENC_20090, ENC_34110, ENC_19160, ENC_00130, ENC_39120, ENC_23520, ENC_34890, ENC_01640, ENC_01700, ENC_12700, ENC_07150, ENC_18520, ENC_03650, ENC_03660, ENC_09780, ENC_18300, ENC_21490, ENC_42450, ENC_45970, ENC_06960, ENC_42440, ENC_44970, ENC_15210, ENC_16040, ENC_18950, ENC_34310, ENC_04740, ENC_26480, ENC_04560, ENC_21110, ENC_17620, ENC_15900, ENC_18290, ENC_26190, ENC_28140, ENC_42910, ENC_04700, ENC_29120, ENC_08830, ENC_33440, ENC_18400, ENC_32020, ENC_42660, ENC_13620, ENC_25610, ENC_02110, ENC_02570, and ENC_06620, or from the group of genes consisting of ENC_39630, ENC_32540, ENC_20090, ENC_44710, ENC_46830, ENC_37880, ENC_04160, ENC_26410, ENC_05800, ENC_43540, ENC_38400, and ENC_30490, preferably ENC_20090, ENC_44710, ENC_46830, ENC_37880, ENC_04160, ENC_26410, ENC_05800, ENC_43540, ENC_38400, and ENC_30490, or from the genes listed in Table 5b, preferably in Table 5d.

[0165] According to certain embodiments of the method of the third aspect and related methods, the genetic sites in the genome of Enterobacter associated with antimicrobial drug, e.g. antibiotic, resistance are at least comprised in one gene from the group of genes consisting of ST548_p8085, ST548_p3778, ST548_p5387, ST548_p7737, ST548_p5658, and ST548_p4310, preferably ST548_p5387, ST548_p7737, ST548_p5658, and ST548_p4310, and/or ENC_39630, ENC_32540, ENC_20090, ENC_44710, ENC_46830, ENC_37880, ENC_04160, ENC_26410, ENC_05800, ENC_43540, ENC_38400, and ENC_30490, preferably ENC_20090, ENC_44710, ENC_46830, ENC_37880, ENC_04160, ENC_26410, ENC_05800, ENC_43540, ENC_38400, and ENC_30490.

[0166] According to certain embodiments of the method of the third aspect and related methods, an antimicrobial drug, e.g. antibiotic, resistance profile for bacterial microorganisms of Enterobacter aerogenes is determined and the genetic sites in the genome of Enterobacter associated with antimicrobial drug, e.g. antibiotic, resistance are at least comprised in one gene from the group of genes consisting of ST548_p8085, ST548_p3778, ST548_p5387, ST548_p7737, ST548_p5658, and ST548_p4310, preferably ST548_p5387, ST548_p7737, ST548_p5658, and ST548_p4310.

[0167] According to certain embodiments of the method of the third aspect and related methods, an antimicrobial drug, e.g. antibiotic, resistance profile for bacterial microorganisms of Enterobacter cloacae is determined and the genetic sites in the genome of Enterobacter associated with antimicrobial drug, e.g. antibiotic, resistance are at least comprised in one gene from the group of genes consisting of ENC_39630, ENC_32540, ENC_20090, ENC_44710, ENC_46830, ENC_37880, ENC_04160, ENC_26410, ENC_05800, ENC_43540, ENC_38400, and ENC_30490, preferably ENC_20090, ENC_44710, ENC_46830, ENC_37880, ENC_04160, ENC_26410, ENC_05800, ENC_43540, ENC_38400, and ENC_30490.

[0168] According to certain embodiments of the method of the third aspect and related methods, the genetic variant has a point mutation, an insertion and or deletion of up to four bases, and/or a frameshift mutation, particularly a non-synonymous coding in YP_007386513.1 in case of Enterobacter aerogenes and/or a non-synonymous coding in YP_007847284.1 and/or YP_007846710.1 in case of Enterobacter cloacae.

[0169] A fourth aspect of the present invention relates to a method of determining an antimicrobial drug, e.g. antibiotic, resistance profile for a bacterial microorganism belonging to the species Enterobacter, particularly Enterobacter aerogenes and/or Enterobacter cloacae, comprising the steps of

a) obtaining or providing a sample containing or suspected of containing the bacterial microorganism;
b) determining the presence of a mutation in at least one gene of the bacterial microorganism as determined by the method of the third aspect of the invention;
wherein the presence of a mutation is indicative of a resistance to an antimicrobial drug, e.g. antibiotic, drug.

[0170] Steps a) and b) can herein be carried out as described with regard to the first aspect, as well as for the following aspects of the invention.

[0171] With this method, any mutations in the genome of Enterobacter species, particularly Enterobacter aerogenes and/or Enterobacter cloacae, correlated with antimicrobial drug, e.g. antibiotic, resistance can be determined and a thorough antimicrobial drug, e.g. antibiotic, resistance profile can be established.

[0172] A simple read out concept for a diagnostic test as described in this aspect is shown schematically in FIG. 1.

[0173] According to FIG. 1, a sample 1, e.g. blood from a patient, is used for molecular testing 2, e.g. using next generation sequencing (NGS), and then a molecular fingerprint 3 is taken, e.g. in case of NGS a sequence of selected genomic/plasmid regions or the whole genome is assembled. This is then compared to a reference library 4, i.e. selected sequences or the whole sequence are/is compared to one or more reference sequences, and mutations (SNPs, sequence-gene additions/deletions, etc.) are correlated with susceptibility/reference profile of reference strains in the reference library. The reference library 4 herein contains many genomes and is different from a reference genome. Then the result 5 is reported comprising ID (pathogen identification), i.e. a list of all (pathogenic) species identified in the sample, and AST (antimicrobial susceptibility testing), i.e. a list including a susceptibility/resistance profile for all species listed

[0174] A fifth aspect of the present invention relates to a diagnostic method of determining an infection of a patient with Enterobacter species, particularly Enterobacter aerogenes and/or Enterobacter cloacae, potentially resistant to antimicrobial drug treatment, which also can be described as method of determining an antimicrobial drug, e.g. antibiotic, resistant Enterobacter, particularly Enterobacter aerogenes and/or Enterobacter cloacae, infection in a patient, comprising the steps of:

a) obtaining or providing a sample containing or suspected of containing a bacterial microorganism belonging to the species Enterobacter, particularly Enterobacter aerogenes and/or Enterobacter cloacae, from the patient;
b) determining the presence of at least one mutation in at least one gene of the bacterial microorganism belonging to the species Enterobacter, particularly Enterobacter aerogenes and/or Enterobacter cloacae, as determined by the method of the third aspect of the present invention, wherein the presence of said at least one mutation is indicative of an antimicrobial drug, e.g. antibiotic, resistant Enterobacter, particularly Enterobacter aerogenes and/or Enterobacter cloacae, infection in said patient.

[0175] Again, steps a) and b) can herein be carried out as described with regard to the first aspect of the present invention.

[0176] According to this aspect, an Enterobacter, particularly Enterobacter aerogenes and/or Enterobacter cloacae, infection in a patient can be determined using sequencing methods as well as a resistance to antimicrobial drugs, e.g. antibiotics, of the Enterobacter species, particularly Enterobacter aerogenes and/or Enterobacter cloacae, be determined in a short amount of time compared to the conventional methods.

[0177] In a sixth aspect the present invention relates to a method of selecting a treatment of a patient suffering from an infection with a potentially resistant Enterobacter strain, particularly Enterobacter aerogenes and/or Enterobacter cloacae, e.g. an antimicrobial drug, e.g. antibiotic, resistant Enterobacter, particularly Enterobacter aerogenes and/or Enterobacter cloacae, infection, comprising the steps of:

a) obtaining or providing a sample containing or suspected of containing a bacterial microorganism belonging to the species Enterobacter, particularly Enterobacter aerogenes and/or Enterobacter cloacae, from the patient;
b) determining the presence of at least one mutation in at least one gene of the bacterial microorganism belonging to the species Enterobacter, particularly Enterobacter aerogenes and/or Enterobacter cloacae, as determined by the method of the third aspect of the invention, wherein the presence of said at least one mutation is indicative of a resistance to one or more antimicrobial, e.g. antibiotic, drugs;
c) identifying said at least one or more antimicrobial, e.g. antibiotic, drugs; and
d) selecting one or more antimicrobial, e.g. antibiotic, drugs different from the ones identified in step c) and being suitable for the treatment of an Enterobacter, particularly Enterobacter aerogenes and/or Enterobacter cloacae, infection.

[0178] This method can be carried out similarly to the second aspect of the invention and enables a fast was to select a suitable treatment with antibiotics for any infection with an unknown Enterobacter species, particularly Enterobacter aerogenes and/or Enterobacter cloacae.

[0179] A seventh aspect of the present invention relates to a method of acquiring, respectively determining, an antimicrobial drug, e.g. antibiotic, resistance profile for a bacterial microorganism of Enterobacter species, particularly Enterobacter aerogenes and/or Enterobacter cloacae, comprising:

obtaining or providing a first data set of gene sequences of a clinical isolate of Enterobacter species;
providing a second data set of antimicrobial drug, e.g. antibiotic, resistance of a plurality of clinical isolates of Enterobacter species, particularly Enterobacter aerogenes and/or Enterobacter cloacae;
aligning the gene sequences of the first data set to at least one, preferably one or two, preferably one, reference genome(s) of Enterobacter, particularly Enterobacter aerogenes and/or Enterobacter cloacae, and/or assembling the gene sequence of the first data set, at least in part;
analyzing the gene sequences of the first data set for genetic variants to obtain a third data set of genetic variants of the first data set;
correlating the third data set with the second data set and statistically analyzing the correlation; and
determining the genetic sites in the genome of Enterobacter, particularly Enterobacter aerogenes and/or Enterobacter cloacae, of the first data set associated with antimicrobial drug, e.g. antibiotic, resistance.

[0180] With this method, antimicrobial drug, e.g. antibiotic, resistances in an unknown isolate of Enterobacter, particularly Enterobacter aerogenes and/or Enterobacter cloacae, can be determined.

[0181] According to certain embodiments, the reference genome of Enterobacter is NC_020181 and/or NC_021046, as annotated at the NCBI. According to certain embodiments, the reference genome of Enterobacter aerogenes is NC_020181 and the reference genome of Enterobacter cloacae is NC_021046, as annotated at the NCBI. According to certain embodiments, statistical analysis in the present methods is carried out using Fisher's test with p<10⁻⁶, preferably p<10⁻⁹, particularly p<10⁻¹⁰. Also, according to certain embodiments, the method further comprises correlating different genetic sites to each other, e.g. in at least two, three, four, five, six, seven, eight, nine or ten genes.

[0182] An eighth aspect of the present invention relates to a computer program product comprising computer executable instructions which, when executed, perform a method according to the third, fourth, fifth, sixth or seventh aspect of the present invention.

[0183] In certain embodiments the computer program product is one on which program commands or program codes of a computer program for executing said method are stored. According to certain embodiments the computer program product is a storage medium. The same applies to the computer program products of the aspects mentioned afterwards, i.e. the eleventh aspect of the present invention. As noted above, the computer program products of the present invention can be self-learning, e.g. with respect to the first and second data sets.

[0184] In order to obtain the best possible information from the highly complex genetic data and develop an optimum model for diagnostic and therapeutical uses as well as the methods of the present invention—which can be applied stably in clinical routine—a thorough in silico analysis can be necessary. The proposed principle is based on a combination of different approaches, e.g. alignment with at least one, preferably more reference genomes, and/or assembly of the genome and correlation of mutations found in every sample, e.g. from each patient, with all references and drugs, e.g. antibiotics, and search for mutations which occur in several drug and several strains.

[0185] Using the above steps a list of mutations as well of genes is generated. These can be stored in databases and statistical models can be derived from the databases. The statistical models can be based on at least one or more mutations at least one or more genes. Statistical models that can be trained can be combined from mutations and genes. Examples of algorithms that can produce such models are association Rules, Support Vector Machines, Decision Trees, Decision Forests, Discriminant-Analysis, Cluster-Methods, and many more.

[0186] The goal of the training is to allow a reproducible, standardized application during routine procedures.

[0187] For this, for example, a genome or parts of the genome of a microorganism can be sequenced from a patient to be diagnosed. Afterwards, core characteristics can be derived from the sequence data which can be used to predict resistance.

[0188] These are the points in the database used for the final model, i.e. at least one mutation or at least one gene, but also combinations of mutations, etc.

[0189] The corresponding characteristics can be used as input for the statistical model and thus enable a prognosis for new patients. Not only the information regarding all resistances of all microorganisms, e.g. of Enterobacter species, particularly Enterobacter aerogenes and/or Enterobacter cloacae, against all drugs, e.g. antibiotics, can be integrated in a computer decision support tool, but also corresponding directives (e.g. EUCAST) so that only treatment proposals are made that are in line with the directives.

[0190] A ninth aspect of the present invention relates to the use of the computer program product according to the eighth aspect for acquiring an antimicrobial drug, e.g. antibiotic, resistance profile for bacterial microorganisms of Enterobacter species, particularly Enterobacter aerogenes and/or Enterobacter cloacae, or in a method of the third aspect of the invention.

[0191] In a tenth aspect a method of selecting a treatment of a patient having an infection with a bacterial microorganism of Enterobacter species, particularly Enterobacter aerogenes and/or Enterobacter cloacae, comprising:

obtaining or providing a first data set comprising a gene sequence of at least one clinical isolate of the microorganism from the patient;
providing a second data set of antimicrobial drug, e.g. antibiotic, resistance of a plurality of clinical isolates of the microorganism;
aligning the gene sequences of the first data set to at least one, preferably one or two, preferably one, reference genome(s) of the microorganism, and/or assembling the gene sequence of the first data set, at least in part;
analyzing the gene sequences of the first data set for genetic variants to obtain a third data set of genetic variants of the first data set;
correlating the third data set with the second data set of antimicrobial drug, e.g. antibiotic, resistance of a plurality of clinical isolates of the microorganism and statistically analyzing the correlation;
determining the genetic sites in the genome of the clinical isolate of the microorganism of the first data set associated with antimicrobial drug, e.g. antibiotic, resistance; and
selecting a treatment of the patient with one or more antimicrobial, e.g. antibiotic, drugs different from the ones identified in the determination of the genetic sites associated with antimicrobial drug, e.g. antibiotic, resistance is disclosed.

[0192] Again, the steps can be carried out as similar steps before. In this method, as well as similar ones, no aligning is necessary, as the unknown sample can be directly correlated, after the genome or genome sequences are produced, with the second data set and thus mutations and antimicrobial drug, e.g. antibiotic, resistances can be determined. The first data set can be assembled, for example, using known techniques.

[0193] According to certain embodiments, statistical analysis in the present method is carried out using Fisher's test with p<10⁻⁶, preferably p<10⁻⁹, particularly p<10⁻¹⁰. Also, according to certain embodiments, the method further comprises correlating different genetic sites to each other.

[0194] An eleventh aspect of the present invention is directed to a computer program product comprising computer executable instructions which, when executed, perform a method according to the tenth aspect.

[0195] According to a twelfth aspect of the present invention, a diagnostic method of determining an infection of a patient with Enterobacter species, particularly Enterobacter aerogenes and/or Enterobacter cloacae, potentially resistant to antimicrobial drug treatment, which can also be described as a method of determining an antimicrobial drug, e.g. antibiotic, resistant Enterobacter, particularly Enterobacter aerogenes and/or Enterobacter cloacae, infection of a patient is disclosed, comprising the steps of:

a) obtaining or providing a sample containing or suspected of containing at least one Enterobacter species, particularly Enterobacter aerogenes and/or Enterobacter cloacae, from the patient;
b) determining the presence of at least one mutation in at least two genes from the group of genes listed in Table 5a, preferably Table 5c, and/or Table 5b, preferably Table 5d, wherein the presence of said at least two mutations is indicative of an antimicrobial drug, e.g. antibiotic, resistant Enterobacter, particularly Enterobacter aerogenes and/or Enterobacter cloacae, infection in said patient.

[0196] According to certain embodiments of the twelfth aspect, a diagnostic method of determining an infection of a patient with Enterobacter aerogenes potentially resistant to antimicrobial drug treatment, which can also be described as a method of determining an antimicrobial drug, e.g. antibiotic, resistant Enterobacter aerogenes infection of a patient, is disclosed, comprising the steps of:

a) obtaining or providing a sample containing or suspected of containing at least one Enterobacter aerogenes strain from the patient;
b) determining the presence of at least one mutation in at least two genes from the group of genes listed in Table 5a, preferably Table 5c, wherein the presence of said at least two mutations is indicative of an antimicrobial drug, e.g. antibiotic, resistant Enterobacter aerogenes infection in said patient.

[0197] According to certain embodiments of the twelfth aspect, a diagnostic method of determining an infection of a patient with Enterobacter cloacae potentially resistant to antimicrobial drug treatment, which can also be described as a method of determining an antimicrobial drug, e.g. antibiotic, resistant Enterobacter cloacae infection of a patient, is disclosed, comprising the steps of:

a) obtaining or providing a sample containing or suspected of containing at least one Enterobacter cloacae strain from the patient;
b) determining the presence of at least one mutation in at least two genes from the group of genes listed in Table 5b, preferably Table 5d, wherein the presence of said at least two mutations is indicative of an antimicrobial drug, e.g. antibiotic, resistant Enterobacter cloacae infection in said patient.

[0198] A thirteenth aspect of the invention discloses a method of selecting a treatment of a patient suffering from an antimicrobial drug, e.g. antibiotic, resistant Enterobacter, particularly Enterobacter aerogenes and/or Enterobacter cloacae, infection, comprising the steps of:

a) obtaining or providing a sample containing or suspected of containing at least one Enterobacter species, particularly Enterobacter aerogenes and/or Enterobacter cloacae, from the patient;
b) determining the presence of at least one mutation in at least two genes from the group of genes listed in Table 5a, preferably Table 5c, and/or Table 5b, preferably Table 5d, wherein the presence of said at least two mutations is indicative of a resistance to one or more antimicrobial, e.g. antibiotic, drugs;
c) identifying said at least one or more antimicrobial, e.g. antibiotic, drugs; and
d) selecting one or more antimicrobial, e.g. antibiotic, drugs different from the ones identified in step c) and being suitable for the treatment of an Enterobacter, particularly Enterobacter aerogenes and/or Enterobacter cloacae, infection.

[0199] According to certain embodiments the thirteenth aspect refates to a method of selecting a treatment of a patient suffering from an antimicrobial drug, e.g. antibiotic, resistant Enterobacter aerogenes infection, comprising the steps of:

a) obtaining or providing a sample containing or suspected of containing at least one Enterobacter aerogenes strain from the patient;
b) determining the presence of at least one mutation in at least two genes from the group of genes listed in Table 5a, preferably Table 5c, wherein the presence of said at least two mutations is indicative of a resistance to one or more antimicrobial, e.g. antibiotic, drugs;
c) identifying said at least one or more antimicrobial, e.g. antibiotic, drugs; and
d) selecting one or more antimicrobial, e.g. antibiotic, drugs different from the ones identified in step c) and being suitable for the treatment of an Enterobacter aerogenes infection.

[0200] According to certain embodiments the thirteenth aspect relates to a method of selecting a treatment of a patient suffering from an antimicrobial drug, e.g. antibiotic, resistant Enterobacter cloacae infection, comprising the steps of:

a) obtaining or providing a sample containing or suspected of containing at least one Enterobacter cloacae strain from the patient;
b) determining the presence of at least one mutation in at least two genes from the group of genes listed in Table 5b, preferably Table 5d, wherein the presence of said at least two mutations is indicative of a resistance to one or more antimicrobial, e.g. antibiotic, drugs;
c) identifying said at least one or more antimicrobial, e.g. antibiotic, drugs; and
d) selecting one or more antimicrobial, e.g. antibiotic, drugs different from the ones identified in step c) and being suitable for the treatment of an Enterobacter cloacae infection.

[0201] Again, the steps can be carried out as in similar methods before, e.g. as in the first and second aspect of the invention. In the twelfth and thirteenth aspect of the invention, as well as also the eighteenth aspect of the present invention, all classes of antibiotics considered in the present method are covered.

[0202] Herein, the genes in Table 5a, particularly relating to Enterobacter aerogenes, are the following:

ST548_p8085, ST548_p3778, ST548_p5387, ST548_p7737, ST548_p7940, ST548_p7919, ST548_p7543, ST548_p7426, ST548_p7336, ST548_p7239, ST548_p6918, ST548_p6844, ST548_p6794, ST548_p6618, ST548_p6494, ST548_p6478, ST548_p6451, ST548_p6386, ST548_p6367, ST548_p6066, ST548_p5966, ST548_p5904, ST548_p5779, ST548_p5658, ST548_p5474, ST548_p5447, ST548_p5300, ST548_p5259, ST548_p5115, ST548_p5081, ST548_p4891, ST548_p4836, ST548_p4577, ST548_p4310, ST548_p4203, ST548_p4107, ST548_p3593, ST548_p3452, ST548_p7944, ST548_p3464, ST548_p7296, ST548_p5257, ST548_p4364, ST548_p4137, ST548_p4611, ST548_p4841, ST548_p7855, ST548_p7086, ST548_p6814, ST548_p5341.

[0203] The genes in Table 5b, particularly relating to Enterobacter cloacae, are the following:

ENC_39630, ENC_32540, ENC_20090, ENC_34110, ENC_19160, ENC_00130, ENC_39120, ENC_23520, ENC_34890, ENC_01640, ENC_01700, ENC_12700, ENC_07150, ENC_18520, ENC_03650, ENC_03660, ENC_09780, ENC_18300, ENC_21490, ENC_42450, ENC_45970, ENC_06960, ENC_42440, ENC_44970, ENC_15210, ENC_16040, ENC_18950, ENC_34310, ENC_04740, ENC_26480, ENC_04560, ENC_21110, ENC_17620, ENC_15900, ENC_18290, ENC_26190, ENC_28140, ENC_42910, ENC_04700, ENC_29120, ENC_08830, ENC_33440, ENC_18400, ENC_32020, ENC_42660, ENC_13620, ENC_25610, ENC_02110, ENC_02570, ENC_06620, ENC_44710, ENC_46830, ENC_37880, ENC_04160, ENC_26410, ENC_05800, ENC_43540, ENC_38400, ENC_30490, ENC_45930, ENC_26270, ENC_26610, ENC_42560, and ENC_01270.

[0204] Herein, the genes in Table 5c, particularly relating to Enterobacter aerogenes, are the following:

ST548_p5387, ST548_p7737, ST548_p7940, ST548_p7919, ST548_p7543, ST548_p7426, ST548_p7336, ST548_p7239, ST548_p6918, ST548_p6844, ST548_p6794, ST548_p6618, ST548_p6494, ST548_p6478, ST548_p6451, ST548_p6386, ST548_p6367, ST548_p6066, ST548_p5966, ST548_p5904, ST548_p5779, ST548_p5658, ST548_p5474, ST548_p5447, ST548_p5300, ST548_p5259, ST548_p5115, ST548_p5081, ST548_p4891, ST548_p4836, ST548_p4577, ST548_p4310, ST548_p4203, ST548_p4107, ST548_p3593, ST548_p3452, ST548_p7944, ST548_p3464, ST548_p7296, ST548_p5257, ST548_p4364, ST548_p4137, ST548_p4611, ST548_p4841, ST548_p7855, ST548_p7086, ST548_p6814, ST548_p5341.

[0205] The genes in Table 5d, particularly relating to Enterobacter cloacae, are the following:

ENC_20090, ENC_34110, ENC_19160, ENC_00130, ENC_39120, ENC_23520, ENC_34890, ENC_01640, ENC_01700, ENC_12700, ENC_07150, ENC_18520, ENC_03650, ENC_03660, ENC_09780, ENC_18300, ENC_21490, ENC_42450, ENC_45970, ENC_06960, ENC_42440, ENC_44970, ENC_15210, ENC_16040, ENC_18950, ENC_34310, ENC_04740, ENC_26480, ENC_04560, ENC_21110, ENC_17620, ENC_15900, ENC_18290, ENC_26190, ENC_28140, ENC_42910, ENC_04700, ENC_29120, ENC_08830, ENC_33440, ENC_18400, ENC_32020, ENC_42660, ENC_13620, ENC_25610, ENC_02110, ENC_02570, ENC_06620, ENC_44710, ENC_46830, ENC_37880, ENC_04160, ENC_26410, ENC_05800, ENC_43540, ENC_38400, ENC_30490, ENC_45930, ENC_26270, ENC_26610, ENC_42560, and ENC_01270.

TABLE 5a
List of genes, particularly relating to Enterobacter aerogenes

| | | | | |
|---|---|---|---|---|
| ST548_p8085 | ST548_p3778 | ST548_p5387 | ST548_p7737 | ST548_p7940 |
| ST548_p7919 | ST548_p7543 | ST548_p7426 | ST548_p7336 | ST548_p7239 |
| ST548_p6918 | ST548_p6844 | ST548_p6794 | ST548_p6618 | ST548_p6494 |
| ST548_p6478 | ST548_p6451 | ST548_p6386 | ST548_p6367 | ST548_p6066 |
| ST548_p5966 | ST548_p5904 | ST548_p5779 | ST548_p5658 | ST548_p5474 |
| ST548_p5447 | ST548_p5300 | ST548_p5259 | ST548_p5115 | ST548_p5081 |
| ST548_p4891 | ST548_p4836 | ST548_p4577 | ST548_p4310 | ST548_p4203 |
| ST548_p4107 | ST548_p3593 | ST548_p3452 | ST548_p7944 | ST548_p3464 |
| ST548_p7296 | ST548_p5257 | ST548_p4364 | ST548_p4137 | ST548_p4611 |
| ST548_p4841 | ST548_p7855 | ST548_p7086 | ST548_p6814 | ST548_p5341 |

TABLE 5b
List of genes, particularly relating to Enterobacter cloacae

| | | | | |
|---|---|---|---|---|
| ENC_39630 | ENC_32540 | ENC_20090 | ENC_34110 | ENC_19160 |
| ENC_00130 | ENC_39120 | ENC_23520 | ENC_34890 | ENC_01640 |
| ENC_01700 | ENC_12700 | ENC_07150 | ENC_18520 | ENC_03650 |
| ENC_03660 | ENC_09780 | ENC_18300 | ENC_21490 | ENC_42450 |
| ENC_45970 | ENC_06960 | ENC_42440 | ENC_44970 | ENC_15210 |
| ENC_16040 | ENC_18950 | ENC_34310 | ENC_04740 | ENC_26480 |
| ENC_04560 | ENC_21110 | ENC_17620 | ENC_15900 | ENC_18290 |
| ENC_26190 | ENC_28140 | ENC_42910 | ENC_04700 | ENC_29120 |
| ENC_08830 | ENC_33440 | ENC_18400 | ENC_32020 | ENC_42660 |
| ENC_13620 | ENC_25610 | ENC_02110 | ENC_02570 | ENC_06620 |
| ENC_44710 | ENC_46830 | ENC_37880 | ENC_04160 | ENC_26410 |
| ENC_05800 | ENC_43540 | ENC_38400 | ENC_30490 | ENC_45930 |
| ENC_26270 | ENC_26610 | ENC_42560 | ENC_01270 | |

TABLE 5c
List of genes, particularly relating to Enterobacter aerogenes

| | | | | |
|---|---|---|---|---|
| ST548_p6814 | ST548_p5341 | ST548_p5387 | ST548_p7737 | ST548_p7940 |
| ST548_p7919 | ST548_p7543 | ST548_p7426 | ST548_p7336 | ST548_p7239 |
| ST548_p6918 | ST548_p6844 | ST548_p6794 | ST548_p6618 | ST548_p6494 |
| ST548_p6478 | ST548_p6451 | ST548_p6386 | ST548_p6367 | ST548_p6066 |
| ST548_p5966 | ST548_p5904 | ST548_p5779 | ST548_p5658 | ST548_p5474 |
| ST548_p5447 | ST548_p5300 | ST548_p5259 | ST548_p5115 | ST548_p5081 |
| ST548_p4891 | ST548_p4836 | ST548_p4577 | ST548_p4310 | ST548_p4203 |
| ST548_p4107 | ST548_p3593 | ST548_p3452 | ST548_p7944 | ST548_p3464 |
| ST548_p7296 | ST548_p5257 | ST548_p4364 | ST548_p4137 | ST548_p4611 |
| ST548_p4841 | ST548_p7855 | ST548_p7086 | | |

TABLE 5d
List of genes, particularly relating to Enterobacter cloacae

| | | | | |
|---|---|---|---|---|
| ENC_42560 | ENC_01270 | ENC_20090 | ENC_34110 | ENC_19160 |
| ENC_00130 | ENC_39120 | ENC_23520 | ENC_34890 | ENC_01640 |
| ENC_01700 | ENC_12700 | ENC_07150 | ENC_18520 | ENC_03650 |
| ENC_03660 | ENC_09780 | ENC_18300 | ENC_21490 | ENC_42450 |
| ENC_45970 | ENC_06960 | ENC_42440 | ENC_44970 | ENC_15210 |
| ENC_16040 | ENC_18950 | ENC_34310 | ENC_04740 | ENC_26480 |
| ENC_04560 | ENC_21110 | ENC_17620 | ENC_15900 | ENC_18290 |
| ENC_26190 | ENC_28140 | ENC_42910 | ENC_04700 | ENC_29120 |
| ENC_08830 | ENC_33440 | ENC_18400 | ENC_32020 | ENC_42660 |
| ENC_13620 | ENC_25610 | ENC_02110 | ENC_02570 | ENC_06620 |
| ENC_44710 | ENC_46830 | ENC_37880 | ENC_04160 | ENC_26410 |
| ENC_05800 | ENC_43540 | ENC_38400 | ENC_30490 | ENC_45930 |
| ENC_26270 | ENC_26610 | | | |

[0206] According to certain embodiments, mutations in at least two, three, four, five, six, seven, eight, nine or ten genes are determined in any of the methods of the present invention, e.g. in at least two genes or in at least three genes. Instead of testing only single genes or mutants, a combination of several variant positions can improve the prediction accuracy and further reduce false positive findings that are influenced by other factors. Therefore, it is in particular preferred to determine the presence of a mutation in 2, 3, 4, 5, 6, 7, 8 or 9 (or more) genes selected from Table 5a and/or 5b, preferably Table 5c and/or 5d.

[0207] Further, according to certain embodiments, the reference genome of Enterobacter is NC_020181 and/or NC_021046, as annotated at the NCBI. According to certain embodiments, the reference genome of Enterobacter aerogenes is NC_020181 and the reference genome of Enterobacter cloacae is NC_021046, as annotated at the NCBI. According to certain embodiments, statistical analysis in the present methods is carried out using Fisher's test with p<10⁻⁶, preferably p<10⁻⁹, particularly p<10⁻¹⁰. Also, according to certain embodiments, the method further comprises correlating different genetic sites to each other. Also the other aspects of the embodiments of the first and second aspect of the invention apply.

[0208] According to certain embodiments of the method of the twelfth and/or thirteenth aspect of the present invention, as well as also of the eighteenth aspect of the present invention, the antimicrobial drug is an antibiotic. According to certain embodiments, the antibiotic is a lactam antibiotic and a mutation in at least one of the genes listed in Table 6, preferably Table 6a, is detected, or a mutation in at least one of the positions (denoted POS in the tables) listed in Table 6, preferably Table 6a, wherein the Enterobacter species is particularly Enterobacter cloacae.

[0209] According to certain embodiments of the method of the twelfth and/or thirteenth aspect of the present invention, as well as also of the eighteenth aspect of the present invention, the antibiotic is CPE and a mutation in at least one of the genes of ENC_39630, ENC_20090, ENC_20090, ENC_46830, ENC_01640, ENC_21490, ENC_02570, ENC_45930, ENC_26270, ENC_26610, ENC_42560, preferably ENC_20090, ENC_20090, ENC_46830, ENC_01640, ENC_21490, ENC_02570, ENC_45930, ENC_26270, ENC_26610, ENC_42560, is detected, or a mutation in at least one of the positions of 4019444, 2054358, 2054359, 4791743, 173905, 2195955, 268130, 4690459, 2661018, 2692622, 4332640, preferably 2054358, 2054359, 4791743, 173905, 2195955, 268130, 4690459, 2661018, 2692622, 4332640.

TABLE 6
List for lactam antibiotics, particularly for Enterobacter cloacae

| | | | | genbank protein |
|---|---|---|---|---|
| gene name | POS | antibiotic | p-value (FDR) | accession number |
| ENC_39630 | 4019444 | T/S; TE; CFT; LVX; GM; | 1.27243E−44 | YP_007847284.1 |
| | | CRM; ETP; CP; CAX; AZT; | | |
| | | P/T; CPE; CAZ; TO | | |
| ENC_20090 | 2054358 | CAZ; CFT; CPE; P/T; CAX | 1.49296E−13 | YP_007845743.1 |
| ENC_20090 | 2054359 | CAZ; CFT; CPE; P/T; CAX | 1.49296E−13 | YP_007845743.1 |
| ENC_46830 | 4791743 | CAZ; CFT; CPE; P/T; CAX | 5.1957E−11 | YP_007847834.1 |
| ENC_01640 | 173905 | CFT; CPE; P/T; CAX | 3.10168E−12 | YP_007844327.1 |
| ENC_21490 | 2195955 | P/T; CPE; CAX | 4.21349E−12 | YP_007845840.1 |
| ENC_02570 | 268130 | P/T; CPE; CAX | 1.63132E−11 | YP_007844400.1 |
| ENC_45930 | 4690459 | P/T; CPE; CAX | 1.66782E−11 | YP_007847762.1 |
| ENC_26270 | 2661018 | P/T; CPE; CAX | 2.4499E−11 | YP_007846214.1 |
| ENC_26610 | 2692622 | P/T; CPE; CAX | 2.89554E−11 | YP_007846244.1 |
| ENC_42560 | 4332640 | AZT; CRM; CPE | 8.03142E−11 | YP_007847492.1 |
| ENC_01270 | 129038 | CFT; P/T; CAX | 1.02787E−10 | YP_007844293.1 |

FDR: determined according to FDR (Benjamini Hochberg) method (Benjamini Hochberg, 1995)

TABLE 6a
List for lactam antibiotics, particularly for Enterobacter cloacae

| | | | | genbank protein |
|---|---|---|---|---|
| gene name | POS | antibiotic | p-value (FDR) | accession number |
| ENC_20090 | 2054358 | CAZ; CFT; CPE; P/T; CAX | 1.49296E−13 | YP_007845743.1 |
| ENC_20090 | 2054359 | CAZ; CFT; CPE; P/T; CAX | 1.49296E−13 | YP_007845743.1 |
| ENC_46830 | 4791743 | CAZ; CFT; CPE; P/T; CAX | 5.1957E−11 | YP_007847834.1 |
| ENC_01640 | 173905 | CFT; CPE; P/T; CAX | 3.10168E−12 | YP_007844327.1 |
| ENC_21490 | 2195955 | P/T; CPE; CAX | 4.21349E−12 | YP_007845840.1 |
| ENC_02570 | 268130 | P/T; CPE; CAX | 1.63132E−11 | YP_007844400.1 |
| ENC_45930 | 4690459 | P/T; CPE; CAX | 1.66782E−11 | YP_007847762.1 |
| ENC_26270 | 2661018 | P/T; CPE; CAX | 2.4499E−11 | YP_007846214.1 |
| ENC_26610 | 2692622 | P/T; CPE; CAX | 2.89554E−11 | YP_007846244.1 |
| ENC_42560 | 4332640 | AZT; CRM; CPE | 8.03142E−11 | YP_007847492.1 |
| ENC_01270 | 129038 | CFT; P/T; CAX | 1.02787E−10 | YP_007844293.1 |

[0210] According to certain embodiments of the method of the twelfth and/or thirteenth aspect of the present invention, as well as also of the eighteenth aspect of the present invention, the Enterobacter species is particularly Enterobacter cloacae, the antibiotic is CAZ and a mutation in at least one of the genes of ENC_39630, ENC_20090, ENC_20090, ENC_46830, preferably ENC_20090, ENC_20090, ENC_46830, is detected, or a mutation in at least one of the positions of 4019444, 2054358, 2054359, 4791743, preferably 2054358, 2054359, 4791743.

[0211] According to certain embodiments of the method of the twelfth and/or thirteenth aspect of the present invention, as well as also of the eighteenth aspect of the present invention, the Enterobacter species is particularly Enterobacter cloacae, the antibiotic is CFT and a mutation in at least one of the genes of ENC_39630, ENC_20090, ENC_20090, ENC_46830, ENC_01640, ENC_01270, preferably ENC_20090, ENC_20090, ENC_46830, ENC_01640, ENC_01270, is detected, or a mutation in at least one of the positions of 4019444, 2054358, 2054359, 4791743, 173905, 129038, preferably 2054358, 2054359, 4791743, 173905, 129038.

[0212] According to certain embodiments of the method of the twelfth and/or thirteenth aspect of the present invention, as well as also of the eighteenth aspect of the present invention, the Enterobacter species is particularly Enterobacter cloacae, the antibiotic is at least one of P/T and CAX and a mutation in at least one of the genes of ENC_39630, ENC_20090, ENC_20090, ENC_46830, ENC_01640, ENC_21490, ENC_02570, ENC_45930, ENC_26270, ENC_26610, ENC_01270, preferably ENC_20090, ENC_20090, ENC_46830, ENC_01640, ENC_21490, ENC_02570, ENC_45930, ENC_26270, ENC_26610, ENC_01270, is detected, or a mutation in at least one of the positions of 4019444, 2054358, 2054359, 4791743, 173905, 2195955, 268130, 4690459, 2661018, 2692622, 129038, preferably 2054358, 2054359, 4791743, 173905, 2195955, 268130, 4690459, 2661018, 2692622, 129038.

[0213] According to certain embodiments of the method of the twelfth and/or thirteenth aspect of the present invention, as well as also of the eighteenth aspect of the present invention, the Enterobacter species is particularly Enterobacter cloacae, the antibiotic is at least one of AZT and CRM and a mutation in at least one of the genes of ENC_39630, ENC_42560, preferably ENC_42560, is detected, or a mutation in at least one of the positions of 4019444, 4332640, preferably 4332640.

[0214] According to certain embodiments of the method of the twelfth and/or thirteenth aspect of the present invention, as well as also of the eighteenth aspect of the present invention, the Enterobacter species is particularly Enterobacter cloacae, the antibiotic is ETP and a mutation in ENC_39630 is detected, or a mutation in position 4019444.

[0215] According to certain embodiments of the method of the twelfth and/or thirteenth aspect of the present invention, as well as also of the eighteenth aspect of the present invention, the antibiotic is a quinolone antibiotic and a mutation in at least one of the genes listed in Table 7a or Table 7b, preferably Table 7c or Table 7d, is detected, or a mutation in at least one of the positions (denoted POS in the tables) listed in Table 7a or Table 7b, preferably Table 7c or Table 7d. According to certain embodiments, the Enterobacter species is particularly Enterobacter aerogenes and a mutation in at least one of the genes listed in Table 7a, preferably Table 7c, is detected, or a mutation in at least one of the positions (denoted POS in the tables) listed in Table 7a, preferably Table 7c. According to certain embodiments, the Enterobacter species is particularly Enterobacter cloacae and a mutation in at least one of the genes listed in Table 7b, preferably Table 7d, is detected, or a mutation in at least one of the positions (denoted POS in the tables) listed in Table 7b, preferably Table 7d.

[0216] According to certain embodiments of the method of the twelfth and/or thirteenth aspect of the present invention, as well as also of the eighteenth aspect of the present invention, the Enterobacter species is particularly Enterobacter aerogenes, the antibiotic is at least one of CP and LVX and a mutation in at least one of the genes of ST548_p8085, ST548_p3778, ST548_p5387, ST548_p7737, ST548_p5658, ST548_p4310, preferably ST548_p5387, ST548_p7737, ST548_p5658, ST548_p4310, is detected, or a mutation in at least one of the positions of 171368, 4648161, 2963787, 578343, 2685678, 4106378, preferably 2963787, 578343, 2685678, 4106378.

[0217] According to certain embodiments of the method of the twelfth and/or thirteenth aspect of the present invention, as well as also of the eighteenth aspect of the present invention, the Enterobacter species is particularly Enterobacter aerogenes, the antibiotic is CP and a mutation in at least one of the genes of ST548_p7940, ST548_p7919, ST548_p7543, ST548_p7426, ST548_p7336, ST548_p7239, ST548_p6918, ST548_p6844, ST548_p6794 is detected, or a mutation in at least one of the positions of 308760, 330342, 759640, 875320, 968582, 968583, 1075621, 1388768, 1456507, 1510620.

TABLE 7a
List for quinolone antibiotics, particularly for Enterobacter aerogenes

| | | | | genbank protein |
|---|---|---|---|---|
| gene name | POS | antibiotic | p-value (FDR) | accession number |
| ST548_p8085 | 171368 | T/S; LVX; CP; TO | 1.3483E−40 | YP_007386513.1 |
| ST548_p3778 | 4648161 | CP; LVX | 2.71131E−14 | YP_007390820.1 |
| ST548_p5387 | 2963787 | LVX; CP; TO | 1.01879E−11 | YP_007389211.1 |
| ST548_p7737 | 578343 | LVX; CP; TO | 9.05703E−11 | YP_007386861.1 |
| ST548_p5658 | 2685678 | LVX; CP; TO | 9.76294E−11 | YP_007388940.1 |
| ST548_p4310 | 4106378 | LVX; CP; TO | 9.76294E−11 | YP_007390288.1 |
| ST548_p7940 | 308760 | CP; TO | 9.76294E−11 | YP_007386658.1 |
| ST548_p7919 | 330342 | CP; TO | 9.76294E−11 | YP_007386679.1 |
| ST548_p7543 | 759640 | CP; TO | 9.76294E−11 | YP_007387055.1 |
| ST548_p7426 | 875320 | CP; TO | 9.76294E−11 | YP_007387172.1 |
| ST548_p7336 | 968582 | CP; TO | 9.76294E−11 | YP_007387262.1 |
| ST548_p7336 | 968583 | CP; TO | 9.76294E−11 | YP_007387262.1 |
| ST548_p7239 | 1075621 | CP; TO | 9.76294E−11 | YP_007387359.1 |
| ST548_p6918 | 1388768 | CP; TO | 9.76294E−11 | YP_007387680.1 |
| ST548_p6844 | 1456507 | CP; TO | 9.76294E−11 | YP_007387754.1 |
| ST548_p6794 | 1510620 | CP; TO | 9.76294E−11 | YP_007387804.1 |

TABLE 7c
List for quinolone antibiotics, particularly for Enterobacter aerogenes

| | | | | genbank protein |
|---|---|---|---|---|
| gene name | POS | antibiotic | p-value (FDR) | accession number |
| ST548_p5387 | 2963787 | LVX; CP; TO | 1.01879E−11 | YP_007389211.1 |
| ST548_p7737 | 578343 | LVX; CP; TO | 9.05703E−11 | YP_007386861.1 |
| ST548_p5658 | 2685678 | LVX; CP; TO | 9.76294E−11 | YP_007388940.1 |
| ST548_p4310 | 4106378 | LVX; CP; TO | 9.76294E−11 | YP_007390288.1 |
| ST548_p7940 | 308760 | CP; TO | 9.76294E−11 | YP_007386658.1 |
| ST548_p7919 | 330342 | CP; TO | 9.76294E−11 | YP_007386679.1 |
| ST548_p7543 | 759640 | CP; TO | 9.76294E−11 | YP_007387055.1 |
| ST548_p7426 | 875320 | CP; TO | 9.76294E−11 | YP_007387172.1 |
| ST548_p7336 | 968582 | CP; TO | 9.76294E−11 | YP_007387262.1 |
| ST548_p7336 | 968583 | CP; TO | 9.76294E−11 | YP_007387262.1 |
| ST548_p7239 | 1075621 | CP; TO | 9.76294E−11 | YP_007387359.1 |
| ST548_p6918 | 1388768 | CP; TO | 9.76294E−11 | YP_007387680.1 |
| ST548_p6844 | 1456507 | CP; TO | 9.76294E−11 | YP_007387754.1 |
| ST548_p6794 | 1510620 | CP; TO | 9.76294E−11 | YP_007387804.1 |

[0218] According to certain embodiments of the method of the twelfth and/or thirteenth aspect of the present invention, as well as also of the eighteenth aspect of the present invention, the Enterobacter species is particularly Enterobacter cloacae, the antibiotic is at least one of CP and LVX and a mutation in at least one of the genes of ENC_39630, ENC_32540, ENC_44710, ENC_37880, ENC_04160, ENC_26410, ENC_05800, ENC_26410, ENC_43540, ENC_38400, ENC_30490, preferably ENC_44710, ENC_37880, ENC_04160, ENC_26410, ENC_05800, ENC_26410, ENC_43540, ENC_38400, ENC_30490, is detected, or a mutation in at least one of the positions of 4019444, 3290230, 4557569, 3833518, 4019456, 438917, 2674813, 611929, 2674795, 4428726, 3888032, 3076462, preferably 4557569, 3833518, 4019456, 438917, 2674813, 611929, 2674795, 4428726, 3888032, 3076462, further preferably 4557569, 3833518, 438917, 2674813, 611929, 2674795, 4428726, 3888032, 3076462.

[0219] According to certain embodiments of the method of the twelfth and/or thirteenth aspect of the present invention, as well as also of the eighteenth aspect of the present invention, the Enterobacter species is particularly Enterobacter cloacae, the antibiotic is LVX and a mutation in ENC_15830 is detected, or a mutation in position 1628632.

TABLE 7b
List for quinolone antibiotics, particularly for Enterobacter cloacae

| | | | | genbank protein |
|---|---|---|---|---|
| gene name | POS | antibiotic | p-value (FDR) | accession number |
| ENC_39630 | 4019444 | T/S; TE; CFT; LVX; GM; | 1.27243E−44 | YP_007847284.1 |
| | | CRM; ETP; CP; CAX; AZT; | | |
| | | P/T; CPE; CAZ; TO | | |
| ENC_32540 | 3290230 | LVX; TE; CPE; CP; GM | 1.57067E−27 | YP_007846710.1 |
| ENC_44710 | 4557569 | LVX; CP; TO | 5.1957E−11 | YP_007847666.1 |
| ENC_37880 | 3833518 | CP; LVX | 7.54177E−11 | YP_007847147.1 |
| ENC_39630 | 4019456 | CP; LVX | 8.37839E−11 | YP_007847284.1 |
| ENC_04160 | 438917 | CP; LVX | 8.56385E−11 | YP_007844534.1 |
| ENC_26410 | 2674813 | CP; LVX | 8.56385E−11 | YP_007846226.1 |
| ENC_05800 | 611929 | CP; LVX | 9.62793E−11 | YP_007844680.1 |
| ENC_26410 | 2674795 | CP; LVX | 1.01391E−10 | YP_007846226.1 |
| ENC_43540 | 4428726 | CP; LVX | 1.43181E−10 | YP_007847570.1 |
| ENC_38400 | 3888032 | CP; LVX | 3.2269E−10 | YP_007847188.1 |
| ENC_30490 | 3076462 | CP; LVX | 5.0671E−10 | YP_007846541.1 |
| ENC_15830 | 1628632 | LVX; CPE | 2.56307E−11 | YP_007845415.1 |

TABLE 7d
List for quinolone antibiotics, particularly for Enterobacter cloacae

| | | | | genbank protein |
|---|---|---|---|---|
| gene name | POS | antibiotic | p-value (FDR) | accession number |
| ENC_44710 | 4557569 | LVX; CP; TO | 5.1957E−11 | YP_007847666.1 |
| ENC_37880 | 3833518 | CP; LVX | 7.54177E−11 | YP_007847147.1 |
| ENC_04160 | 438917 | CP; LVX | 8.56385E−11 | YP_007844534.1 |
| ENC_26410 | 2674813 | CP; LVX | 8.56385E−11 | YP_007846226.1 |
| ENC_05800 | 611929 | CP; LVX | 9.62793E−11 | YP_007844680.1 |
| ENC_26410 | 2674795 | CP; LVX | 1.01391E−10 | YP_007846226.1 |
| ENC_43540 | 4428726 | CP; LVX | 1.43181E−10 | YP_007847570.1 |
| ENC_38400 | 3888032 | CP; LVX | 3.2269E−10 | YP_007847188.1 |
| ENC_30490 | 3076462 | CP; LVX | 5.0671E−10 | YP_007846541.1 |
| ENC_15830 | 1628632 | LVX; CPE | 2.56307E−11 | YP_007845415.1 |

[0220] According to certain embodiments of the method of the twelfth and/or thirteenth aspect of the present invention, as well as also of the eighteenth aspect of the present invention, the antibiotic is an aminoglycoside antibiotic and a mutation in at least one of the genes listed in Table 8a and/or Table 8b, preferably Table 8c and/or Table 8d, is detected, or a mutation in at least one of the positions (denoted POS in the tables) listed in Table 8a and/or Table 8b, preferably Table 8c and/or Table 8d. According to certain embodiments, the Enterobacter species is particularly Enterobacter aerogenes and a mutation in at least one of the genes listed in Table 8a, preferably Table 8c, is detected, or a mutation in at least one of the positions (denoted POS in the tables) listed in Table 8a, preferably Table 8c. According to certain embodiments, the Enterobacter species is particularly Enterobacter cloacae and a mutation in at least one of the genes listed in Table 8b, preferably Table 8d, is detected, or a mutation in at least one of the positions (denoted POS in the tables) listed in Table 8b, preferably Table 8d.

TABLE 8a
List of aminoglycoside antibiotics, particularly
for Enterobacter aerogenes

| | | | | genbank protein |
|---|---|---|---|---|
| gene name | POS | antibiotic | p-value (FDR) | accession number |
| ST548_p8085 | 171368 | T/S; LVX; CP; TO | 1.3483E−40 | YP_007386513.1 |
| ST548_p5387 | 2963787 | LVX; CP; TO | 1.01879E−11 | YP_007389211.1 |
| ST548_p7737 | 578343 | LVX; CP; TO | 9.05703E−11 | YP_007386861.1 |
| ST548_p7940 | 308760 | CP; TO | 9.76294E−11 | YP_007386658.1 |
| ST548_p7919 | 330342 | CP; TO | 9.76294E−11 | YP_007386679.1 |
| ST548_p7543 | 759640 | CP; TO | 9.76294E−11 | YP_007387055.1 |
| ST548_p7426 | 875320 | CP; TO | 9.76294E−11 | YP_007387172.1 |
| ST548_p7336 | 968582 | CP; TO | 9.76294E−11 | YP_007387262.1 |
| ST548_p7336 | 968583 | CP; TO | 9.76294E−11 | YP_007387262.1 |
| ST548_p7239 | 1075621 | CP; TO | 9.76294E−11 | YP_007387359.1 |
| ST548_p6918 | 1388768 | CP; TO | 9.76294E−11 | YP_007387680.1 |
| ST548_p6844 | 1456507 | CP; TO | 9.76294E−11 | YP_007387754.1 |
| ST548_p6794 | 1510620 | CP; TO | 9.76294E−11 | YP_007387804.1 |
| ST548_p6618 | 1688528 | CP; TO | 9.76294E−11 | YP_007387980.1 |
| ST548_p6494 | 1814445 | CP; TO | 9.76294E−11 | YP_007388104.1 |
| ST548_p6478 | 1828376 | CP; TO | 9.76294E−11 | YP_007388120.1 |

TABLE 8c
List of aminoglycoside antibiotics, particularly for Enterobacter aerogenes

| | | | | genbank protein |
|---|---|---|---|---|
| gene name | POS | antibiotic | p-value (FDR) | accession number |
| ST548_p7737 | 578343 | LVX; CP; TO | 9.05703E−11 | YP_007386861.1 |
| ST548_p7940 | 308760 | CP; TO | 9.76294E−11 | YP_007386658.1 |
| ST548_p7919 | 330342 | CP; TO | 9.76294E−11 | YP_007386679.1 |
| ST548_p7543 | 759640 | CP; TO | 9.76294E−11 | YP_007387055.1 |
| ST548_p7426 | 875320 | CP; TO | 9.76294E−11 | YP_007387172.1 |
| ST548_p7336 | 968582 | CP; TO | 9.76294E−11 | YP_007387262.1 |
| ST548_p7336 | 968583 | CP; TO | 9.76294E−11 | YP_007387262.1 |
| ST548_p7239 | 1075621 | CP; TO | 9.76294E−11 | YP_007387359.1 |
| ST548_p6918 | 1388768 | CP; TO | 9.76294E−11 | YP_007387680.1 |
| ST548_p6844 | 1456507 | CP; TO | 9.76294E−11 | YP_007387754.1 |
| ST548_p6794 | 1510620 | CP; TO | 9.76294E−11 | YP_007387804.1 |
| ST548_p6618 | 1688528 | CP; TO | 9.76294E−11 | YP_007387980.1 |
| ST548_p6494 | 1814445 | CP; TO | 9.76294E−11 | YP_007388104.1 |
| ST548_p6478 | 1828376 | CP; TO | 9.76294E−11 | YP_007388120.1 |

[0221] According to certain embodiments of the method of the twelfth and/or thirteenth aspect of the present invention, as well as also of the eighteenth aspect of the present invention, the Enterobacter species is particularly Enterobacter aerogenes, the antibiotic is TO and a mutation in at least one of the genes of ST548_p8085, ST548_p5387, ST548_p7737, ST548_p7940, ST548_p7919, ST548_p7543, ST548_p7426, ST548_p7336, ST548_p7239, ST548_p6918, ST548_p6844, ST548_p6794, ST548_p6618, ST548_p6494, ST548_p6478, preferably ST548_p5387, ST548_p7737, ST548_p7940, ST548_p7919, ST548_p7543, ST548_p7426, ST548_p7336, ST548_p7239, ST548_p6918, ST548_p6844, ST548_p6794, ST548_p6618, ST548_p6494, ST548_p6478, is detected, or a mutation in at least one of the positions of 171368, 2963787, 578343, 308760, 330342, 759640, 875320, 968582, 968583, 1075621, 1388768, 1456507, 1510620, 1688528, 1814445, 1828376, preferably 2963787, 578343, 308760, 330342, 759640, 875320, 968582, 968583, 1075621, 1388768, 1456507, 1510620, 1688528, 1814445, 1828376.

TABLE 8b
List of aminoglycoside antibiotics, particularly for Enterobacter cloacae

| | | | | genbank protein |
|---|---|---|---|---|
| gene name | POS | antibiotic | p-value (FDR) | accession number |
| ENC_39630 | 4019444 | T/S; TE; CFT; LVX; GM; | 1.27243E−44 | YP_007847284.1 |
| | | CRM; ETP; CP; CAX; AZT; | | |
| | | P/T; CPE; CAZ; TO | | |
| ENC_32540 | 3290230 | LVX; TE; CPE; CP; GM | 1.57067E−27 | YP_007846710.1 |
| ENC_44710 | 4557569 | LVX; CP; TO | 5.1957E−11 | YP_007847666.1 |

TABLE 8d
List of aminoglycoside antibiotics, particularly
for Enterobacter cloacae

| | | | | genbank protein |
|---|---|---|---|---|
| gene name | POS | antibiotic | p-value (FDR) | accession number |
| ENC_44710 | 4557569 | LVX; CP; | 5.1957E−11 | YP_007847666.1 |
| | | TO | | |

[0222] According to certain embodiments of the method of the twelfth and/or thirteenth aspect of the present invention, as well as also of the eighteenth aspect of the present invention, the Enterobacter species is particularly Enterobacter cloacae, the antibiotic is at least one of GM and TO and a mutation in ENC_39630 is detected, or a mutation in position 4019444.

[0223] According to certain embodiments of the method of the twelfth and/or thirteenth aspect of the present invention, as well as also of the eighteenth aspect of the present invention, the Enterobacter species is particularly Enterobacter cloacae, the antibiotic is GM and a mutation in ENC_32540 is detected, or a mutation in position 3290230.

[0224] According to certain embodiments of the method of the twelfth and/or thirteenth aspect of the present invention, as well as also of the eighteenth aspect of the present invention, the Enterobacter species is particularly Enterobacter cloacae, the antibiotic is TO and a mutation in ENC_44710 is detected, or a mutation in position 4557569.

[0225] According to certain embodiments of the method of the twelfth and/or thirteenth aspect of the present invention, as well as also of the eighteenth aspect of the present invention, the antibiotic is a polyketide antibiotic and a mutation in at least one of the genes listed in Table 9 is detected, or a mutation in at least one of the positions (denoted POS in the tables) listed in Table 9, wherein the Enterobacter species is particularly Enterobacter cloacae.

TABLE 9
List of polyketides, preferably tetracycline, particularly for Enterobacter cloacae

| | | | | genbank protein |
|---|---|---|---|---|
| gene name | POS | antibiotic | p-value (FDR) | accession number |
| ENC_39630 | 4019444 | T/S; TE; CFT; LVX; GM; | 1.27243E−44 | YP_007847284.1 |
| | | CRM; ETP; CP; CAX; AZT; | | |
| | | P/T; CPE; CAZ; TO | | |
| ENC_32540 | 3290230 | LVX; TE; CPE; CP; GM | 1.57067E−27 | YP_007846710.1 |

[0226] According to certain embodiments of the method of the twelfth and/or thirteenth aspect of the present invention, as well as also of the eighteenth aspect of the present invention, the Enterobacter species is particularly Enterobacter cloacae, the antibiotic is TE and a mutation in at least one of the genes of ENC_39630, ENC_32540 is detected, or a mutation in at least one of the positions of 4019444, 3290230.

[0227] According to certain embodiments of the method of the twelfth and/or thirteenth aspect of the present invention, as well as also of the eighteenth aspect of the present invention, the antibiotic is T/S and a mutation in at least one of the genes listed in Table 10a and or Table 10b is detected, or a mutation in at least one of the positions (denoted POS in the tables) listed in Table 10a and or Table 10b. According to certain embodiments, the Enterobacter species is particularly Enterobacter aerogenes and a mutation in at least one of the genes listed in Table 10a is detected, or a mutation in at least one of the positions (denoted POS in the tables) listed in Table 10a. According to certain embodiments, the Enterobacter species is particularly Enterobacter cloacae and a mutation in at least one of the genes listed in Table 10b is detected, or a mutation in at least one of the positions (denoted POS in the tables) listed in Table 10b.

TABLE 10a
List of benzene derived/sulfonamide antibiotics,
particularly for Enterobacter aerogenes

| | | | | genbank protein |
|---|---|---|---|---|
| gene name | POS | antibiotic | p-value (FDR) | accession number |
| ST548_p8085 | 171368 | T/S; LVX; | 1.3483E−40 | YP_007386513.1 |
| | | CP; TO | | |

TABLE 10b
List of benzene derived/sulfonamide antibiotics,
particularly for Enterobacter cloacae

| | | | | genbank protein |
|---|---|---|---|---|
| gene name | POS | antibiotic | p-value (FDR) | accession number |
| ENC_39630 | 4019444 | T/S; TE; CFT; LVX; | 1.27243E−44 | YP_007847284.1 |
| | | GM; CRM; ETP; CP; | | |
| | | CAX; AZT; P/T; | | |
| | | CPE; CAZ; TO | | |

[0228] A fourteenth aspect of the present invention is directed to a diagnostic method of determining an infection of a patient with Enterobacter species, particularly Enterobacter aerogenes and/or Enterobacter cloacae, potentially resistant to antimicrobial drug treatment, which can also be described as method of determining an antimicrobial drug, e.g. antibiotic, resistant Enterobacter, particularly Enterobacter aerogenes and/or Enterobacter cloacae, infection of a patient, comprising the steps of:

a) obtaining or providing a sample containing or suspected of containing at least one Enterobacter species, particularly Enterobacter aerogenes and/or Enterobacter cloacae, from the patient;
b) determining the presence of at least one mutation in at least one gene from the group of genes consisting of ST548_p8085, ST548_p3778, ST548_p5387, ST548_p7737, ST548_p7940, ST548_p7919, ST548_p7543, ST548_p7426, ST548_p7336, ST548_p7239, ST548_p6918, ST548_p6844, ST548_p6794, ST548_p6618, ST548_p6494, ST548_p6478, ST548_p6451, ST548_p6386, ST548_p6367, ST548_p6066, ST548_p5966, ST548_p5904, ST548_p5779, ST548_p5658, ST548_p5474, ST548_p5447, ST548_p5300, ST548_p5259, ST548_p5115, ST548_p5081, ST548_p4891, ST548_p4836, ST548_p4577, ST548_p4310, ST548_p4203, ST548_p4107, ST548_p3593, ST548_p3452, ST548_p7944, ST548_p3464, ST548_p7296, ST548_p5257, ST548_p4364, ST548_p4137, ST548_p4611, ST548_p4841, ST548_p7855, ST548_p7086, ST548_p6814, and ST548_p5341, preferably ST548_p5387, ST548_p7737, ST548_p7940, ST548_p7919, ST548_p7543, ST548_p7426, ST548_p7336, ST548_p7239, ST548_p6918, ST548_p6844, ST548_p6794, ST548_p6618, ST548_p6494, ST548_p6478, ST548_p6451, ST548_p6386, ST548_p6367, ST548_p6066, ST548_p5966, ST548_p5904, ST548_p5779, ST548_p5658, ST548_p5474, ST548_p5447, ST548_p5300, ST548_p5259, ST548_p5115, ST548_p5081, ST548_p4891, ST548_p4836, ST548_p4577, ST548_p4310, ST548_p4203, ST548_p4107, ST548_p3593, ST548_p3452, ST548_p7944, ST548_p3464, ST548_p7296, ST548_p5257, ST548_p4364, ST548_p4137, ST548_p4611, ST548_p4841, ST548_p7855, ST548_p7086, ST548_p6814, and ST548_p5341, and/or ENC_39630, ENC_32540, ENC_20090, ENC_34110, ENC_19160, ENC_00130, ENC_39120, ENC_23520, ENC_34890, ENC_01640, ENC_01700, ENC_12700, ENC_07150, ENC_18520, ENC_03650, ENC_03660, ENC_09780, ENC_18300, ENC_21490, ENC_42450, ENC_45970, ENC_06960, ENC_42440, ENC_44970, ENC_15210, ENC_16040, ENC_18950, ENC_34310, ENC_04740, ENC_26480, ENC_04560, ENC_21110, ENC_17620, ENC_15900, ENC_18290, ENC_26190, ENC_28140, ENC_42910, ENC_04700, ENC_29120, ENC_08830, ENC_33440, ENC_18400, ENC_32020, ENC_42660, ENC_13620, ENC_25610, ENC_02110, ENC_02570, and ENC_06620, preferably ENC_20090, ENC_34110, ENC_19160, ENC_00130, ENC_39120, ENC_23520, ENC_34890, ENC_01640, ENC_01700, ENC_12700, ENC_07150, ENC_18520, ENC_03650, ENC_03660, ENC_09780, ENC_18300, ENC_21490, ENC_42450, ENC_45970, ENC_06960, ENC_42440, ENC_44970, ENC_15210, ENC_16040, ENC_18950, ENC_34310, ENC_04740, ENC_26480, ENC_04560, ENC_21110, ENC_17620, ENC_15900, ENC_18290, ENC_26190, ENC_28140, ENC_42910, ENC_04700, ENC_29120, ENC_08830, ENC_33440, ENC_18400, ENC_32020, ENC_42660, ENC_13620, ENC_25610, ENC_02110, ENC_02570, and ENC_06620, or from the group of genes consisting of ST548_p8085, ST548_p3778, ST548_p5387, ST548_p7737, ST548_p5658, and ST548_p4310, preferably ST548_p5387, ST548_p7737, ST548_p5658, and ST548_p4310, and/or ENC_39630, ENC_32540, ENC_20090, ENC_44710, ENC_46830, ENC_37880, ENC_04160, ENC_26410, ENC_05800, ENC_43540, ENC_38400, and ENC_30490, preferably ENC_20090, ENC_44710, ENC_46830, ENC_37880, ENC_04160, ENC_26410, ENC_05800, ENC_43540, ENC_38400, and ENC_30490, wherein the presence of said at least one mutation is indicative of an antimicrobial drug, e.g. antibiotic, resistant Enterobacter, particularly Enterobacter aerogenes and/or Enterobacter cloacae, infection in said patient.

[0229] According to certain embodiments, the method of the fourteenth aspect relates to a diagnostic method of determining an infection of a patient with Enterobacter species, particularly Enterobacter aerogenes, potentially resistant to antimicrobial drug treatment, which can also be described as method of determining an antimicrobial drug, e.g. antibiotic, resistant Enterobacter, particularly Enterobacter aerogenes, infection of a patient, comprising the steps of:

a) obtaining or providing a sample containing or suspected of containing at least one Enterobacter, particularly Enterobacter aerogenes, species from the patient;
b) determining the presence of at least one mutation in at least one gene from the group of genes consisting of ST548_p8085, ST548_p3778, ST548_p5387, ST548_p7737, ST548_p7940, ST548_p7919, ST548_p7543, ST548_p7426, ST548_p7336, ST548_p7239, ST548_p6918, ST548_p6844, ST548_p6794, ST548_p6618, ST548_p6494, ST548_p6478, ST548_p6451, ST548_p6386, ST548_p6367, ST548_p6066, ST548_p5966, ST548_p5904, ST548_p5779, ST548_p5658, ST548_p5474, ST548_p5447, ST548_p5300, ST548_p5259, ST548_p5115, ST548_p5081, ST548_p4891, ST548_p4836, ST548_p4577, ST548_p4310, ST548_p4203, ST548_p4107, ST548_p3593, ST548_p3452, ST548_p7944, ST548_p3464, ST548_p7296, ST548_p5257, ST548_p4364, ST548_p4137, ST548_p4611, ST548_p4841, ST548_p7855, ST548_p7086, ST548_p6814, and ST548_p5341, preferably ST548_p5387, ST548_p7737, ST548_p7940, ST548_p7919, ST548_p7543, ST548_p7426, ST548_p7336, ST548_p7239, ST548_p6918, ST548_p6844, ST548_p6794, ST548_p6618, ST548_p6494, ST548_p6478, ST548_p6451, ST548_p6386, ST548_p6367, ST548_p6066, ST548_p5966, ST548_p5904, ST548_p5779, ST548_p5658, ST548_p5474, ST548_p5447, ST548_p5300, ST548_p5259, ST548_p5115, ST548_p5081, ST548_p4891, ST548_p4836, ST548_p4577, ST548_p4310, ST548_p4203, ST548_p4107, ST548_p3593, ST548_p3452, ST548_p7944, ST548_p3464, ST548_p7296, ST548_p5257, ST548_p4364, ST548_p4137, ST548_p4611, ST548_p4841, ST548_p7855, ST548_p7086, ST548_p6814, and ST548_p5341, or from the group of genes consisting of ST548_p8085, ST548_p3778, ST548_p5387, ST548_p7737, ST548_p5658, and ST548_p4310, preferably ST548_p5387, ST548_p7737, ST548_p5658, and ST548_p4310, wherein the presence of said at least one mutation is indicative of an infection with an antimicrobial, e.g. antibiotic, resistant Enterobacter, particularly Enterobacter aerogenes, strain in said patient.

[0230] According to certain embodiments, the method of the fourteenth aspect relates to a diagnostic method of determining an infection of a patient with Enterobacter species, particularly Enterobacter cloacae, potentially resistant to antimicrobial drug treatment, which can also be described as method of determining an antimicrobial drug, e.g. antibiotic, resistant Enterobacter, particularly Enterobacter cloacae, infection of a patient, comprising the steps of:

a) obtaining or providing a sample containing or suspected of containing at least one Enterobacter species, particularly Enterobacter cloacae, from the patient;
b) determining the presence of at least one mutation in at least one gene from the group of genes consisting of ENC_39630, ENC_32540, ENC_20090, ENC_34110, ENC_19160, ENC_00130, ENC_39120, ENC_23520, ENC_34890, ENC_01640, ENC_01700, ENC_12700, ENC_07150, ENC_18520, ENC_03650, ENC_03660, ENC_09780, ENC_18300, ENC_21490, ENC_42450, ENC_45970, ENC_06960, ENC_42440, ENC_44970, ENC_15210, ENC_16040, ENC_18950, ENC_34310, ENC_04740, ENC_26480, ENC_04560, ENC_21110, ENC_17620, ENC_15900, ENC_18290, ENC_26190, ENC_28140, ENC_42910, ENC_04700, ENC_29120, ENC_08830, ENC_33440, ENC_18400, ENC_32020, ENC_42660, ENC_13620, ENC_25610, ENC_02110, ENC_02570, and ENC_06620, preferably ENC_20090, ENC_34110, ENC_19160, ENC_00130, ENC_39120, ENC_23520, ENC_34890, ENC_01640, ENC_01700, ENC_12700, ENC_07150, ENC_18520, ENC_03650, ENC_03660, ENC_09780, ENC_18300, ENC_21490, ENC_42450, ENC_45970, ENC_06960, ENC_42440, ENC_44970, ENC_15210, ENC_16040, ENC_18950, ENC_34310, ENC_04740, ENC_26480, ENC_04560, ENC_21110, ENC_17620, ENC_15900, ENC_18290, ENC_26190, ENC_28140, ENC_42910, ENC_04700, ENC_29120, ENC_08830, ENC_33440, ENC_18400, ENC_32020, ENC_42660, ENC_13620, ENC_25610, ENC_02110, ENC_02570, and ENC_06620, or from the group of genes consisting of ENC_39630, ENC_32540, ENC_20090, ENC_44710, ENC_46830, ENC_37880, ENC_04160, ENC_26410, ENC_05800, ENC_43540, ENC_38400, and ENC_30490, preferably ENC_20090, ENC_44710, ENC_46830, ENC_37880, ENC_04160, ENC_26410, ENC_05800, ENC_43540, ENC_38400, and ENC_30490, wherein the presence of said at least one mutation is indicative of an infection with an antimicrobial, e.g. antibiotic, resistant Enterobacter, particularly Enterobacter cloacae, strain in said patient.

[0231] A fifteenth aspect of the present invention is directed to a method of selecting a treatment of a patient suffering from an antimicrobial drug, e.g. antibiotic, resistant Enterobacter, particularly Enterobacter aerogenes and/or Enterobacter cloacae, infection, comprising the steps of:

a) obtaining or providing a sample containing or suspected of containing at least one Enterobacter species, particularly Enterobacter aerogenes and/or Enterobacter cloacae, from the patient;
b) determining the presence of at least one mutation in at least one gene from the group of genes consisting of ST548_p8085, ST548_p3778, ST548_p5387, ST548_p7737, ST548_p7940, ST548_p7919, ST548_p7543, ST548_p7426, ST548_p7336, ST548_p7239, ST548_p6918, ST548_p6844, ST548_p6794, ST548_p6618, ST548_p6494, ST548_p6478, ST548_p6451, ST548_p6386, ST548_p6367, ST548_p6066, ST548_p5966, ST548_p5904, ST548_p5779, ST548_p5658, ST548_p5474, ST548_p5447, ST548_p5300, ST548_p5259, ST548_p5115, ST548_p5081, ST548_p4891, ST548_p4836, ST548_p4577, ST548_p4310, ST548_p4203, ST548_p4107, ST548_p3593, ST548_p3452, ST548_p7944, ST548_p3464, ST548_p7296, ST548_p5257, ST548_p4364, ST548_p4137, ST548_p4611, ST548_p4841, ST548_p7855, ST548_p7086, ST548_p6814, and ST548_p5341, preferably ST548_p5387, ST548_p7737, ST548_p7940, ST548_p7919, ST548_p7543, ST548_p7426, ST548_p7336, ST548_p7239, ST548_p6918, ST548_p6844, ST548_p6794, ST548_p6618, ST548_p6494, ST548_p6478, ST548_p6451, ST548_p6386, ST548_p6367, ST548_p6066, ST548_p5966, ST548_p5904, ST548_p5779, ST548_p5658, ST548_p5474, ST548_p5447, ST548_p5300, ST548_p5259, ST548_p5115, ST548_p5081, ST548_p4891, ST548_p4836, ST548_p4577, ST548_p4310, ST548_p4203, ST548_p4107, ST548_p3593, ST548_p3452, ST548_p7944, ST548_p3464, ST548_p7296, ST548_p5257, ST548_p4364, ST548_p4137, ST548_p4611, ST548_p4841, ST548_p7855, ST548_p7086, ST548_p6814, and ST548_p5341, and/or ENC_39630, ENC_32540, ENC_20090, ENC_34110, ENC_19160, ENC_00130, ENC_39120, ENC_23520, ENC_34890, ENC_01640, ENC_01700, ENC_12700, ENC_07150, ENC_18520, ENC_03650, ENC_03660, ENC_09780, ENC_18300, ENC_21490, ENC_42450, ENC_45970, ENC_06960, ENC_42440, ENC_44970, ENC_15210, ENC_16040, ENC_18950, ENC_34310, ENC_04740, ENC_26480, ENC_04560, ENC_21110, ENC_17620, ENC_15900, ENC_18290, ENC_26190, ENC_28140, ENC_42910, ENC_04700, ENC_29120, ENC_08830, ENC_33440, ENC_18400, ENC_32020, ENC_42660, ENC_13620, ENC_25610, ENC_02110, ENC_02570, and ENC_06620, preferably ENC_20090, ENC_34110, ENC_19160, ENC_00130, ENC_39120, ENC_23520, ENC_34890, ENC_01640, ENC_01700, ENC_12700, ENC_07150, ENC_18520, ENC_03650, ENC_03660, ENC_09780, ENC_18300, ENC_21490, ENC_42450, ENC_45970, ENC_06960, ENC_42440, ENC_44970, ENC_15210, ENC_16040, ENC_18950, ENC_34310, ENC_04740, ENC_26480, ENC_04560, ENC_21110, ENC_17620, ENC_15900, ENC_18290, ENC_26190, ENC_28140, ENC_42910, ENC_04700, ENC_29120, ENC_08830, ENC_33440, ENC_18400, ENC_32020, ENC_42660, ENC_13620, ENC_25610, ENC_02110, ENC_02570, and ENC_06620, or from the group of genes consisting of ST548_p8085, ST548_p3778, ST548_p5387, ST548_p7737, ST548_p5658, and ST548_p4310, preferably ST548_p5387, ST548_p7737, ST548_p5658, and ST548_p4310, and/or ENC_39630, ENC_32540, ENC_20090, ENC_44710, ENC_46830, ENC_37880, ENC_04160, ENC_26410, ENC_05800, ENC_43540, ENC_38400, and ENC_30490, preferably ENC_20090, ENC_44710, ENC_46830, ENC_37880, ENC_04160, ENC_26410, ENC_05800, ENC_43540, ENC_38400, and ENC_30490, wherein the presence of said at least one mutation is indicative of a resistance to one or more antimicrobial, e.g. antibiotic, drugs;
c) identifying said at least one or more antimicrobial, e.g. antibiotic, drugs; and
d) selecting one or more antimicrobial, e.g. antibiotic, drugs different from the ones identified in step c) and being suitable for the treatment of an Enterobacter, particularly Enterobacter aerogenes and/or Enterobacter cloacae, infection.

[0232] According to certain embodiments, the method of the fifteenth aspect relates to a method of selecting a treatment of a patient suffering from an infection with a potentially resistant Enterobacter strain, particularly Enterobacter aerogenes, e.g. from an antimicrobial drug, e.g. antibiotic, resistant Enterobacter, particularly Enterobacter aerogenes, infection, comprising the steps of:

a) obtaining or providing a sample containing or suspected of containing at least one Enterobacter species, particularly Enterobacter aerogenes, from the patient;
b) determining the presence of at least one mutation in at least one gene from the group of genes consisting of ST548_p8085, ST548_p3778, ST548_p5387, ST548_p7737, ST548_p7940, ST548_p7919, ST548_p7543, ST548_p7426, ST548_p7336, ST548_p7239, ST548_p6918, ST548_p6844, ST548_p6794, ST548_p6618, ST548_p6494, ST548_p6478, ST548_p6451, ST548_p6386, ST548_p6367, ST548_p6066, ST548_p5966, ST548_p5904, ST548_p5779, ST548_p5658, ST548_p5474, ST548_p5447, ST548_p5300, ST548_p5259, ST548_p5115, ST548_p5081, ST548_p4891, ST548_p4836, ST548_p4577, ST548_p4310, ST548_p4203, ST548_p4107, ST548_p3593, ST548_p3452, ST548_p7944, ST548_p3464, ST548_p7296, ST548_p5257, ST548_p4364, ST548_p4137, ST548_p4611, ST548_p4841, ST548_p7855, ST548_p7086, ST548_p6814, and ST548_p5341, preferably ST548_p5387, ST548_p7737, ST548_p7940, ST548_p7919, ST548_p7543, ST548_p7426, ST548_p7336, ST548_p7239, ST548_p6918, ST548_p6844, ST548_p6794, ST548_p6618, ST548_p6494, ST548_p6478, ST548_p6451, ST548_p6386, ST548_p6367, ST548_p6066, ST548_p5966, ST548_p5904, ST548_p5779, ST548_p5658, ST548_p5474, ST548_p5447, ST548_p5300, ST548_p5259, ST548_p5115, ST548_p5081, ST548_p4891, ST548_p4836, ST548_p4577, ST548_p4310, ST548_p4203, ST548_p4107, ST548_p3593, ST548_p3452, ST548_p7944, ST548_p3464, ST548_p7296, ST548_p5257, ST548_p4364, ST548_p4137, ST548_p4611, ST548_p4841, ST548_p7855, ST548_p7086, ST548_p6814, and ST548_p5341, or from the group of genes consisting of ST548_p8085, ST548_p3778, ST548_p5387, ST548_p7737, ST548_p5658, and ST548_p4310, preferably ST548_p5387, ST548_p7737, ST548_p5658, and ST548_p4310, wherein the presence of said at least one mutation is indicative of a resistance to one or more antimicrobial, e.g. antibiotic, drugs;
c) identifying said at least one or more antimicrobial, e.g. antibiotic, drugs; and
d) selecting one or more antimicrobial, e.g. antibiotic, drugs different from the ones identified in step c) and being suitable for the treatment of an Enterobacter, particularly Enterobacter aerogenes, infection.

[0233] According to certain embodiments, the method of the fifteenth aspect relates to a method of selecting a treatment of a patient suffering from an infection with a potentially resistant Enterobacter strain, particularly Enterobacter cloacae, e.g. from an antimicrobial drug, e.g. antibiotic, resistant Enterobacter, particularly Enterobacter cloacae, infection, comprising the steps of:

a) obtaining or providing a sample containing or suspected of containing at least one Enterobacter species, particularly Enterobacter cloacae, from the patient;
b) determining the presence of at least one mutation in at least one gene from the group of genes consisting of ENC_39630, ENC_32540, ENC_20090, ENC_34110, ENC_19160, ENC_00130, ENC_39120, ENC_23520, ENC_34890, ENC_01640, ENC_01700, ENC_12700, ENC_07150, ENC_18520, ENC_03650, ENC_03660, ENC_09780, ENC_18300, ENC_21490, ENC_42450, ENC_45970, ENC_06960, ENC_42440, ENC_44970, ENC_15210, ENC_16040, ENC_18950, ENC_34310, ENC_04740, ENC_26480, ENC_04560, ENC_21110, ENC_17620, ENC_15900, ENC_18290, ENC_26190, ENC_28140, ENC_42910, ENC_04700, ENC_29120, ENC_08830, ENC_33440, ENC_18400, ENC_32020, ENC_42660, ENC_13620, ENC_25610, ENC_02110, ENC_02570, and ENC_06620, preferably ENC_20090, ENC_34110, ENC_19160, ENC_00130, ENC_39120, ENC_23520, ENC_34890, ENC_01640, ENC_01700, ENC_12700, ENC_07150, ENC_18520, ENC_03650, ENC_03660, ENC_09780, ENC_18300, ENC_21490, ENC_42450, ENC_45970, ENC_06960, ENC_42440, ENC_44970, ENC_15210, ENC_16040, ENC_18950, ENC_34310, ENC_04740, ENC_26480, ENC_04560, ENC_21110, ENC_17620, ENC_15900, ENC_18290, ENC_26190, ENC_28140, ENC_42910, ENC_04700, ENC_29120, ENC_08830, ENC_33440, ENC_18400, ENC_32020, ENC_42660, ENC_13620, ENC_25610, ENC_02110, ENC_02570, and ENC_06620, or from the group of genes consisting of ENC_39630, ENC_32540, ENC_20090, ENC_44710, ENC_46830, ENC_37880, ENC_04160, ENC_26410, ENC_05800, ENC_43540, ENC_38400, and ENC_30490, preferably ENC_20090, ENC_44710, ENC_46830, ENC_37880, ENC_04160, ENC_26410, ENC_05800, ENC_43540, ENC_38400, and ENC_30490, wherein the presence of said at least one mutation is indicative of a resistance to one or more antimicrobial, e.g. antibiotic, drugs;
c) identifying said at least one or more antimicrobial, e.g. antibiotic, drugs; and
d) selecting one or more antimicrobial, e.g. antibiotic, drugs different from the ones identified in step c) and being suitable for the treatment of an Enterobacter, particularly Enterobacter cloacae, infection.

[0234] Again, in the fourteenth and the fifteenth aspect the steps correspond to those in the first or second aspect, although only a mutation in at least one gene is determined.

[0235] A sixteenth aspect of the present invention is directed to a method of treating a patient suffering from an antimicrobial drug, e.g. antibiotic, resistant Enterobacter, particularly Enterobacter aerogenes and/or Enterobacter cloacae, infection, comprising the steps of:

a) obtaining or providing a sample containing or suspected of containing at least one Enterobacter species, particularly Enterobacter aerogenes and/or Enterobacter cloacae, from the patient;
b) determining the presence of at least one mutation in at least one gene from the group of genes consisting of ST548_p8085, ST548_p3778, ST548_p5387, ST548_p7737, ST548_p7940, ST548_p7919, ST548_p7543, ST548_p7426, ST548_p7336, ST548_p7239, ST548_p6918, ST548_p6844, ST548_p6794, ST548_p6618, ST548_p6494, ST548_p6478, ST548_p6451, ST548_p6386, ST548_p6367, ST548_p6066, ST548_p5966, ST548_p5904, ST548_p5779, ST548_p5658, ST548_p5474, ST548_p5447, ST548_p5300, ST548_p5259, ST548_p5115, ST548_p5081, ST548_p4891, ST548_p4836, ST548_p4577, ST548_p4310, ST548_p4203, ST548_p4107, ST548_p3593, ST548_p3452, ST548_p7944, ST548_p3464, ST548_p7296, ST548_p5257, ST548_p4364, ST548_p4137, ST548_p4611, ST548_p4841, ST548_p7855, ST548_p7086, ST548_p6814, and ST548_p5341, preferably ST548_p5387, ST548_p7737, ST548_p7940, ST548_p7919, ST548_p7543, ST548_p7426, ST548_p7336, ST548_p7239, ST548_p6918, ST548_p6844, ST548_p6794, ST548_p6618, ST548_p6494, ST548_p6478, ST548_p6451, ST548_p6386, ST548_p6367, ST548_p6066, ST548_p5966, ST548_p5904, ST548_p5779, ST548_p5658, ST548_p5474, ST548_p5447, ST548_p5300, ST548_p5259, ST548_p5115, ST548_p5081, ST548_p4891, ST548_p4836, ST548_p4577, ST548_p4310, ST548_p4203, ST548_p4107, ST548_p3593, ST548_p3452, ST548_p7944, ST548_p3464, ST548_p7296, ST548_p5257, ST548_p4364, ST548_p4137, ST548_p4611, ST548_p4841, ST548_p7855, ST548_p7086, ST548_p6814, and ST548_p5341, and/or ENC_39630, ENC_32540, ENC_20090, ENC_34110, ENC_19160, ENC_00130, ENC_39120, ENC_23520, ENC_34890, ENC_01640, ENC_01700, ENC_12700, ENC_07150, ENC_18520, ENC_03650, ENC_03660, ENC_09780, ENC_18300, ENC_21490, ENC_42450, ENC_45970, ENC_06960, ENC_42440, ENC_44970, ENC_15210, ENC_16040, ENC_18950, ENC_34310, ENC_04740, ENC_26480, ENC_04560, ENC_21110, ENC_17620, ENC_15900, ENC_18290, ENC_26190, ENC_28140, ENC_42910, ENC_04700, ENC_29120, ENC_08830, ENC_33440, ENC_18400, ENC_32020, ENC_42660, ENC_13620, ENC_25610, ENC_02110, ENC_02570, and ENC_06620, preferably ENC_20090, ENC_34110, ENC_19160, ENC_00130, ENC_39120, ENC_23520, ENC_34890, ENC_01640, ENC_01700, ENC_12700, ENC_07150, ENC_18520, ENC_03650, ENC_03660, ENC_09780, ENC_18300, ENC_21490, ENC_42450, ENC_45970, ENC_06960, ENC_42440, ENC_44970, ENC_15210, ENC_16040, ENC_18950, ENC_34310, ENC_04740, ENC_26480, ENC_04560, ENC_21110, ENC_17620, ENC_15900, ENC_18290, ENC_26190, ENC_28140, ENC_42910, ENC_04700, ENC_29120, ENC_08830, ENC_33440, ENC_18400, ENC_32020, ENC_42660, ENC_13620, ENC_25610, ENC_02110, ENC_02570, and ENC_06620, or from the group of genes consisting of ST548_p8085, ST548_p3778, ST548_p5387, ST548_p7737, ST548_p5658, and ST548_p4310, preferably ST548_p5387, ST548_p7737, ST548_p5658, and ST548_p4310, and/or ENC_39630, ENC_32540, ENC_20090, ENC_44710, ENC_46830, ENC_37880, ENC_04160, ENC_26410, ENC_05800, ENC_43540, ENC_38400, and ENC_30490, preferably ENC_20090, ENC_44710, ENC_46830, ENC_37880, ENC_04160, ENC_26410, ENC_05800, ENC_43540, ENC_38400, and ENC_30490, wherein the presence of said at least one mutation is indicative of a resistance to one or more antimicrobial, e.g. antibiotic, drugs;
c) identifying said at least one or more antimicrobial, e.g. antibiotic, drugs;
d) selecting one or more antimicrobial, e.g. antibiotic, drugs different from the ones identified in step c) and being suitable for the treatment of an Enterobacter, particularly Enterobacter aerogenes and/or Enterobacter cloacae, infection; and
e) treating the patient with said one or more antimicrobial, e.g. antibiotic, drugs.

[0236] According to certain embodiments, the sixteenth aspect relates to a method of treating a patient suffering from an antimicrobial drug, e.g. antibiotic, resistant Enterobacter, particularly Enterobacter aerogenes, infection, comprising the steps of:

a) obtaining or providing a sample containing or suspected of containing at least one Enterobacter species, particularly Enterobacter aerogenes, from the patient;
b) determining the presence of at least one mutation in at least one gene from the group of genes consisting of ST548_p8085, ST548_p3778, ST548_p5387, ST548_p7737, ST548_p7940, ST548_p7919, ST548_p7543, ST548_p7426, ST548_p7336, ST548_p7239, ST548_p6918, ST548_p6844, ST548_p6794, ST548_p6618, ST548_p6494, ST548_p6478, ST548_p6451, ST548_p6386, ST548_p6367, ST548_p6066, ST548_p5966, ST548_p5904, ST548_p5779, ST548_p5658, ST548_p5474, ST548_p5447, ST548_p5300, ST548_p5259, ST548_p5115, ST548_p5081, ST548_p4891, ST548_p4836, ST548_p4577, ST548_p4310, ST548_p4203, ST548_p4107, ST548_p3593, ST548_p3452, ST548_p7944, ST548_p3464, ST548_p7296, ST548_p5257, ST548_p4364, ST548_p4137, ST548_p4611, ST548_p4841, ST548_p7855, ST548_p7086, ST548_p6814, and ST548_p5341, preferably ST548_p5387, ST548_p7737, ST548_p7940, ST548_p7919, ST548_p7543, ST548_p7426, ST548_p7336, ST548_p7239, ST548_p6918, ST548_p6844, ST548_p6794, ST548_p6618, ST548_p6494, ST548_p6478, ST548_p6451, ST548_p6386, ST548_p6367, ST548_p6066, ST548_p5966, ST548_p5904, ST548_p5779, ST548_p5658, ST548_p5474, ST548_p5447, ST548_p5300, ST548_p5259, ST548_p5115, ST548_p5081, ST548_p4891, ST548_p4836, ST548_p4577, ST548_p4310, ST548_p4203, ST548_p4107, ST548_p3593, ST548_p3452, ST548_p7944, ST548_p3464, ST548_p7296, ST548_p5257, ST548_p4364, ST548_p4137, ST548_p4611, ST548_p4841, ST548_p7855, ST548_p7086, ST548_p6814, and ST548_p5341, or from the group of genes consisting of ST548_p8085, ST548_p3778, ST548_p5387, ST548_p7737, ST548_p5658, and ST548_p4310, preferably ST548_p5387, ST548_p7737, ST548_p5658, and ST548_p4310, wherein the presence of said at least one mutation is indicative of a resistance to one or more antimicrobial, e.g. antibiotic, drugs;
c) identifying said at least one or more antimicrobial, e.g. antibiotic, drugs;
d) selecting one or more antimicrobial, e.g. antibiotic, drugs different from the ones identified in step c) and being suitable for the treatment of an Enterobacter, particularly Enterobacter aerogenes, infection; and
e) treating the patient with said one or more antimicrobial, e.g. antibiotic, drugs.

[0237] According to certain embodiments, the sixteenth aspect relates to a method of treating a patient suffering from an antimicrobial drug, e.g. antibiotic, resistant Enterobacter, particularly Enterobacter cloacae, infection, comprising the steps of:

a) obtaining or providing a sample containing or suspected of containing at least one Enterobacter species, particularly Enterobacter cloacae, from the patient;
b) determining the presence of at least one mutation in at least one gene from the group of genes consisting of ENC_39630, ENC_32540, ENC_20090, ENC_34110, ENC_19160, ENC_00130, ENC_39120, ENC_23520, ENC_34890, ENC_01640, ENC_01700, ENC_12700, ENC_07150, ENC_18520, ENC_03650, ENC_03660, ENC_09780, ENC_18300, ENC_21490, ENC_42450, ENC_45970, ENC_06960, ENC_42440, ENC_44970, ENC_15210, ENC_16040, ENC_18950, ENC_34310, ENC_04740, ENC_26480, ENC_04560, ENC_21110, ENC_17620, ENC_15900, ENC_18290, ENC_26190, ENC_28140, ENC_42910, ENC_04700, ENC_29120, ENC_08830, ENC_33440, ENC_18400, ENC_32020, ENC_42660, ENC_13620, ENC_25610, ENC_02110, ENC_02570, and ENC_06620, preferably ENC_20090, ENC_34110, ENC_19160, ENC_00130, ENC_39120, ENC_23520, ENC_34890, ENC_01640, ENC_01700, ENC_12700, ENC_07150, ENC_18520, ENC_03650, ENC_03660, ENC_09780, ENC_18300, ENC_21490, ENC_42450, ENC_45970, ENC_06960, ENC_42440, ENC_44970, ENC_15210, ENC_16040, ENC_18950, ENC_34310, ENC_04740, ENC_26480, ENC_04560, ENC_21110, ENC_17620, ENC_15900, ENC_18290, ENC_26190, ENC_28140, ENC_42910, ENC_04700, ENC_29120, ENC_08830, ENC_33440, ENC_18400, ENC_32020, ENC_42660, ENC_13620, ENC_25610, ENC_02110, ENC_02570, and ENC_06620, or from the group of genes consisting of ENC_39630, ENC_32540, ENC_20090, ENC_44710, ENC_46830, ENC_37880, ENC_04160, ENC_26410, ENC_05800, ENC_43540, ENC_38400, and ENC_30490, preferably ENC_20090, ENC_44710, ENC_46830, ENC_37880, ENC_04160, ENC_26410, ENC_05800, ENC_43540, ENC_38400, and ENC_30490, wherein the presence of said at least one mutation is indicative of a resistance to one or more antimicrobial, e.g. antibiotic, drugs;
c) identifying said at least one or more antimicrobial, e.g. antibiotic, drugs;
d) selecting one or more antimicrobial, e.g. antibiotic, drugs different from the ones identified in step c) and being suitable for the treatment of an Enterobacter, particularly Enterobacter cloacae, infection; and
e) treating the patient with said one or more antimicrobial, e.g. antibiotic, drugs.

[0238] A seventeenth aspect of the present invention is directed to a method of treating a patient suffering from an antimicrobial drug, e.g. antibiotic, resistant Enterobacter, particularly Enterobacter aerogenes and/or Enterobacter cloacae, infection, comprising the steps of:

a) obtaining or providing a sample containing or suspected of containing at least one Enterobacter species, particularly Enterobacter aerogenes and/or Enterobacter cloacae, from the patient;
b) determining the presence of at least one mutation in at least two genes from the group of genes consisting of ST548_p8085, ST548_p3778, ST548_p5387, ST548_p7737, ST548_p7940, ST548_p7919, ST548_p7543, ST548_p7426, ST548_p7336, ST548_p7239, ST548_p6918, ST548_p6844, ST548_p6794, ST548_p6618, ST548_p6494, ST548_p6478, ST548_p6451, ST548_p6386, ST548_p6367, ST548_p6066, ST548_p5966, ST548_p5904, ST548_p5779, ST548_p5658, ST548_p5474, ST548_p5447, ST548_p5300, ST548_p5259, ST548_p5115, ST548_p5081, ST548_p4891, ST548_p4836, ST548_p4577, ST548_p4310, ST548_p4203, ST548_p4107, ST548_p3593, ST548_p3452, ST548_p7944, ST548_p3464, ST548_p7296, ST548_p5257, ST548_p4364, ST548_p4137, ST548_p4611, ST548_p4841, ST548_p7855, ST548_p7086, ST548_p6814, and ST548_p5341, preferably ST548_p5387, ST548_p7737, ST548_p7940, ST548_p7919, ST548_p7543, ST548_p7426, ST548_p7336, ST548_p7239, ST548_p6918, ST548_p6844, ST548_p6794, ST548_p6618, ST548_p6494, ST548_p6478, ST548_p6451, ST548_p6386, ST548_p6367, ST548_p6066, ST548_p5966, ST548_p5904, ST548_p5779, ST548_p5658, ST548_p5474, ST548_p5447, ST548_p5300, ST548_p5259, ST548_p5115, ST548_p5081, ST548_p4891, ST548_p4836, ST548_p4577, ST548_p4310, ST548_p4203, ST548_p4107, ST548_p3593, ST548_p3452, ST548_p7944, ST548_p3464, ST548_p7296, ST548_p5257, ST548_p4364, ST548_p4137, ST548_p4611, ST548_p4841, ST548_p7855, ST548_p7086, ST548_p6814, and ST548_p5341, and/or ENC_39630, ENC_32540, ENC_20090, ENC_34110, ENC_19160, ENC_00130, ENC_39120, ENC_23520, ENC_34890, ENC_01640, ENC_01700, ENC_12700, ENC_07150, ENC_18520, ENC_03650, ENC_03660, ENC_09780, ENC_18300, ENC_21490, ENC_42450, ENC_45970, ENC_06960, ENC_42440, ENC_44970, ENC_15210, ENC_16040, ENC_18950, ENC_34310, ENC_04740, ENC_26480, ENC_04560, ENC_21110, ENC_17620, ENC_15900, ENC_18290, ENC_26190, ENC_28140, ENC_42910, ENC_04700, ENC_29120, ENC_08830, ENC_33440, ENC_18400, ENC_32020, ENC_42660, ENC_13620, ENC_25610, ENC_02110, ENC_02570, and ENC_06620, preferably ENC_20090, ENC_34110, ENC_19160, ENC_00130, ENC_39120, ENC_23520, ENC_34890, ENC_01640, ENC_01700, ENC_12700, ENC_07150, ENC_18520, ENC_03650, ENC_03660, ENC_09780, ENC_18300, ENC_21490, ENC_42450, ENC_45970, ENC_06960, ENC_42440, ENC_44970, ENC_15210, ENC_16040, ENC_18950, ENC_34310, ENC_04740, ENC_26480, ENC_04560, ENC_21110, ENC_17620, ENC_15900, ENC_18290, ENC_26190, ENC_28140, ENC_42910, ENC_04700, ENC_29120, ENC_08830, ENC_33440, ENC_18400, ENC_32020, ENC_42660, ENC_13620, ENC_25610, ENC_02110, ENC_02570, and ENC_06620, or from the group of genes consisting of ST548_p8085, ST548_p3778, ST548_p5387, ST548_p7737, ST548_p5658, and ST548_p4310, preferably ST548_p5387, ST548_p7737, ST548_p5658, and ST548_p4310, and/or ENC_39630, ENC_32540, ENC_20090, ENC_44710, ENC_46830, ENC_37880, ENC_04160, ENC_26410, ENC_05800, ENC_43540, ENC_38400, and ENC_30490, preferably ENC_20090, ENC_44710, ENC_46830, ENC_37880, ENC_04160, ENC_26410, ENC_05800, ENC_43540, ENC_38400, and ENC_30490, wherein the presence of said at least two mutations is indicative of a resistance to one or more antimicrobial, e.g. antibiotic, drugs;
c) identifying said at least one or more antimicrobial, e.g. antibiotic, drugs;
d) selecting one or more antimicrobial, e.g. antibiotic, drugs different from the ones identified in step c) and being suitable for the treatment of an Enterobacter, particularly Enterobacter aerogenes and/or Enterobacter cloacae, infection; and
e) treating the patient with said one or more antimicrobial, e.g. antibiotic, drugs.

[0239] According to certain embodiments, the seventeenth aspect relates to a method of treating a patient suffering from an antimicrobial drug, e.g. antibiotic, resistant Enterobacter, particularly Enterobacter aerogenes, infection, comprising the steps of:

a) obtaining or providing a sample containing or suspected of containing at least one Enterobacter species, particularly Enterobacter aerogenes, from the patient;
b) determining the presence of at least one mutation in at least two genes from the group of genes consisting of ST548_p8085, ST548_p3778, ST548_p5387, ST548_p7737, ST548_p7940, ST548_p7919, ST548_p7543, ST548_p7426, ST548_p7336, ST548_p7239, ST548_p6918, ST548_p6844, ST548_p6794, ST548_p6618, ST548_p6494, ST548_p6478, ST548_p6451, ST548_p6386, ST548_p6367, ST548_p6066, ST548_p5966, ST548_p5904, ST548_p5779, ST548_p5658, ST548_p5474, ST548_p5447, ST548_p5300, ST548_p5259, ST548_p5115, ST548_p5081, ST548_p4891, ST548_p4836, ST548_p4577, ST548_p4310, ST548_p4203, ST548_p4107, ST548_p3593, ST548_p3452, ST548_p7944, ST548_p3464, ST548_p7296, ST548_p5257, ST548_p4364, ST548_p4137, ST548_p4611, ST548_p4841, ST548_p7855, ST548_p7086, ST548_p6814, and ST548_p5341, preferably ST548_p5387, ST548_p7737, ST548_p7940, ST548_p7919, ST548_p7543, ST548_p7426, ST548_p7336, ST548_p7239, ST548_p6918, ST548_p6844, ST548_p6794, ST548_p6618, ST548_p6494, ST548_p6478, ST548_p6451, ST548_p6386, ST548_p6367, ST548_p6066, ST548_p5966, ST548_p5904, ST548_p5779, ST548_p5658, ST548_p5474, ST548_p5447, ST548_p5300, ST548_p5259, ST548_p5115, ST548_p5081, ST548_p4891, ST548_p4836, ST548_p4577, ST548_p4310, ST548_p4203, ST548_p4107, ST548_p3593, ST548_p3452, ST548_p7944, ST548_p3464, ST548_p7296, ST548_p5257, ST548_p4364, ST548_p4137, ST548_p4611, ST548_p4841, ST548_p7855, ST548_p7086, ST548_p6814, and ST548_p5341, or from the group of genes consisting of ST548_p8085, ST548_p3778, ST548_p5387, ST548_p7737, ST548_p5658, and ST548_p4310, preferably ST548_p5387, ST548_p7737, ST548_p5658, and ST548_p4310, wherein the presence of said at least two mutations is indicative of a resistance to one or more antimicrobial, e.g. antibiotic, drugs;
c) identifying said at least one or more antimicrobial, e.g. antibiotic, drugs;
d) selecting one or more antimicrobial, e.g. antibiotic, drugs different from the ones identified in step c) and being suitable for the treatment of an Enterobacter, particularly Enterobacter aerogenes, infection; and
e) treating the patient with said one or more antimicrobial, e.g. antibiotic, drugs.

[0240] According to certain embodiments, the seventeenth aspect refates to a method of treating a patient suffering from an antimicrobial drug, e.g. antibiotic, resistant Enterobacter, particularly Enterobacter cloacae, infection, comprising the steps of:

a) obtaining or providing a sample containing or suspected of containing at least one Enterobacter species, particularly Enterobacter cloacae, from the patient;
b) determining the presence of at least one mutation in at least two genes from the group of genes consisting of ENC_39630, ENC_32540, ENC_20090, ENC_34110, ENC_19160, ENC_00130, ENC_39120, ENC_23520, ENC_34890, ENC_01640, ENC_01700, ENC_12700, ENC_07150, ENC_18520, ENC_03650, ENC_03660, ENC_09780, ENC_18300, ENC_21490, ENC_42450, ENC_45970, ENC_06960, ENC_42440, ENC_44970, ENC_15210, ENC_16040, ENC_18950, ENC_34310, ENC_04740, ENC_26480, ENC_04560, ENC_21110, ENC_17620, ENC_15900, ENC_18290, ENC_26190, ENC_28140, ENC_42910, ENC_04700, ENC_29120, ENC_08830, ENC_33440, ENC_18400, ENC_32020, ENC_42660, ENC_13620, ENC_25610, ENC_02110, ENC_02570, and ENC_06620, preferably ENC_20090, ENC_34110, ENC_19160, ENC_00130, ENC_39120, ENC_23520, ENC_34890, ENC_01640, ENC_01700, ENC_12700, ENC_07150, ENC_18520, ENC_03650, ENC_03660, ENC_09780, ENC_18300, ENC_21490, ENC_42450, ENC_45970, ENC_06960, ENC_42440, ENC_44970, ENC_15210, ENC_16040, ENC_18950, ENC_34310, ENC_04740, ENC_26480, ENC_04560, ENC_21110, ENC_17620, ENC_15900, ENC_18290, ENC_26190, ENC_28140, ENC_42910, ENC_04700, ENC_29120, ENC_08830, ENC_33440, ENC_18400, ENC_32020, ENC_42660, ENC_13620, ENC_25610, ENC_02110, ENC_02570, and ENC_06620, or from the group of genes consisting of ENC_39630, ENC_32540, ENC_20090, ENC_44710, ENC_46830, ENC_37880, ENC_04160, ENC_26410, ENC_05800, ENC_43540, ENC_38400, and ENC_30490, preferably ENC_20090, ENC_44710, ENC_46830, ENC_37880, ENC_04160, ENC_26410, ENC_05800, ENC_43540, ENC_38400, and ENC_30490, wherein the presence of said at least two mutations is indicative of a resistance to one or more antimicrobial, e.g. antibiotic, drugs;
c) identifying said at least one or more antimicrobial, e.g. antibiotic, drugs;
d) selecting one or more antimicrobial, e.g. antibiotic, drugs different from the ones identified in step c) and being suitable for the treatment of an Enterobacter, particularly Enterobacter cloacae, infection; and
e) treating the patient with said one or more antimicrobial, e.g. antibiotic, drugs.

[0241] An eighteenth aspect of the present invention is directed to a method of treating a patient suffering from an antimicrobial drug, e.g. antibiotic, resistant Enterobacter, particularly Enterobacter aerogenes and/or Enterobacter cloacae, infection, comprising the steps of:

a) obtaining or providing a sample containing or suspected of containing at least one Enterobacter species, particularly Enterobacter aerogenes and/or Enterobacter cloacae, from the patient;
b) determining the presence of at least one mutation in at least two genes from the group of genes listed in Table 5a and/or Table 5b, preferably Table 5c and/or Table 5d, wherein the presence of said at least two mutations is indicative of a resistance to one or more antimicrobial, e.g. antibiotic, drugs;
c) identifying said at least one or more antimicrobial, e.g. antibiotic, drugs;
d) selecting one or more antimicrobial, e.g. antibiotic, drugs different from the ones identified in step c) and being suitable for the treatment of an Enterobacter, particularly Enterobacter aerogenes and/or Enterobacter cloacae, infection; and
e) treating the patient with said one or more antimicrobial, e.g. antibiotic, drugs.

[0242] According to certain embodiments, the eighteenth aspect relates to a method of treating a patient suffering from an antimicrobial drug, e.g. antibiotic, resistant Enterobacter, particularly Enterobacter aerogenes, infection, comprising the steps of:

a) obtaining or providing a sample containing or suspected of containing at least one Enterobacter species, particularly Enterobacter aerogenes, from the patient;
b) determining the presence of at least one mutation in at least two genes from the group of genes listed in Table 5a, preferably Table 5c, wherein the presence of said at least two mutations is indicative of a resistance to one or more antimicrobial, e.g. antibiotic, drugs;
c) identifying said at least one or more antimicrobial, e.g. antibiotic, drugs;
d) selecting one or more antimicrobial, e.g. antibiotic, drugs different from the ones identified in step c) and being suitable for the treatment of an Enterobacter, particularly Enterobacter aerogenes, infection; and
e) treating the patient with said one or more antimicrobial, e.g. antibiotic, drugs

[0243] According to certain embodiments, the eighteenth aspect relates to a method of treating a patient suffering from an antimicrobial drug, e.g. antibiotic, resistant Enterobacter, particularly Enterobacter cloacae, infection, comprising the steps of:

a) obtaining or providing a sample containing or suspected of containing at least one Enterobacter species, particularly Enterobacter cloacae, from the patient;
b) determining the presence of at least one mutation in at least two genes from the group of genes listed in Table 5b, preferably Table 5d, wherein the presence of said at least two mutations is indicative of a resistance to one or more antimicrobial, e.g. antibiotic, drugs;
c) identifying said at least one or more antimicrobial, e.g. antibiotic, drugs;
d) selecting one or more antimicrobial, e.g. antibiotic, drugs different from the ones identified in step c) and being suitable for the treatment of an Enterobacter, particularly Enterobacter cloacae, infection; and
e) treating the patient with said one or more antimicrobial, e.g. antibiotic, drugs

[0244] A nineteenth aspect of the present invention is directed to a method of treating a patient suffering from an antimicrobial drug, e.g. antibiotic, resistant Enterobacter, particularly Enterobacter aerogenes and/or Enterobacter cloacae, infection, comprising the steps of:

a) obtaining or providing a sample containing or suspected of containing at least one Enterobacter species, particularly Enterobacter aerogenes and/or Enterobacter cloacae, from the patient;
b) determining the presence of at least one mutation in at least one gene from the group of genes listed in Table 5a and/or Table 5b, preferably Table 5c and/or Table 5d, wherein the presence of said at least one mutation is indicative of a resistance to one or more antimicrobial, e.g. antibiotic, drugs;
c) identifying said at least one or more antimicrobial, e.g. antibiotic, drugs;
d) selecting one or more antimicrobial, e.g. antibiotic, drugs different from the ones identified in step c) and being suitable for the treatment of an Enterobacter, particularly Enterobacter aerogenes and/or Enterobacter cloacae, infection; and
e) treating the patient with said one or more antimicrobial, e.g. antibiotic, drugs.

[0245] According to certain embodiments, the nineteenth aspect refates to a method of treating a patient suffering from an antimicrobial drug, e.g. antibiotic, resistant Enterobacter, particularly Enterobacter aerogenes, infection, comprising the steps of:

a) obtaining or providing a sample containing or suspected of containing at least one Enterobacter species, particularly Enterobacter aerogenes, from the patient;
b) determining the presence of at least one mutation in at least one gene from the group of genes listed in Table 5a, preferably Table 5c, wherein the presence of said at least one mutation is indicative of a resistance to one or more antimicrobial, e.g. antibiotic, drugs;
c) identifying said at least one or more antimicrobial, e.g. antibiotic, drugs;
d) selecting one or more antimicrobial, e.g. antibiotic, drugs different from the ones identified in step c) and being suitable for the treatment of an Enterobacter, particularly Enterobacter aerogenes, infection; and
e) treating the patient with said one or more antimicrobial, e.g. antibiotic, drugs.

[0246] According to certain embodiments, the nineteenth aspect relates to a method of treating a patient suffering from an antimicrobial drug, e.g. antibiotic, resistant Enterobacter, particularly Enterobacter cloacae, infection, comprising the steps of:

a) obtaining or providing a sample containing or suspected of containing at least one Enterobacter species, particularly Enterobacter cloacae, from the patient;
b) determining the presence of at least one mutation in at least one gene from the group of genes listed in Table 5b, preferably Table 5d, wherein the presence of said at least one mutation is indicative of a resistance to one or more antimicrobial, e.g. antibiotic, drugs;
c) identifying said at least one or more antimicrobial, e.g. antibiotic, drugs;
d) selecting one or more antimicrobial, e.g. antibiotic, drugs different from the ones identified in step c) and being suitable for the treatment of an Enterobacter, particularly Enterobacter cloacae, infection; and
e) treating the patient with said one or more antimicrobial, e.g. antibiotic, drugs.

[0247] Also in the sixteenth to nineteenth aspect of the invention, steps a) to d) are analogous to the steps in the method of the second aspect of the present invention. Step e) can be sufficiently carried out without being restricted and can be done e.g. non-invasively.

[0248] A twentieth aspect of the present invention is directed to a diagnostic method of determining an infection of a patient with Enterobacter species, particularly Enterobacter aerogenes and/or Enterobacter cloacae, potentially resistant to antimicrobial drug treatment, which can also be described as method of determining an antimicrobial drug, e.g. antibiotic, resistant Enterobacter, particularly Enterobacter aerogenes and/or Enterobacter cloacae, infection of a patient, comprising the steps of:

a) obtaining or providing a sample containing or suspected of containing at least one Enterobacter species, particularly Enterobacter aerogenes and/or Enterobacter cloacae, from the patient;
b) determining the presence of at least one mutation in at least one gene from the group of genes listed in Table 5a and/or Table 5b, preferably Table 5c and/or Table 5d, wherein the presence of said at least one mutation is indicative of an antimicrobial drug, e.g. antibiotic, resistant Enterobacter, particularly Enterobacter aerogenes and/or Enterobacter cloacae, infection in said patient.

[0249] According to certain embodiments, the twentieth aspect refates to a diagnostic method of determining an infection of a patient with Enterobacter species, particularly Enterobacter aerogenes, potentially resistant to antimicrobial drug treatment, which can also be described as method of determining an antimicrobial drug, e.g. antibiotic, resistant Enterobacter, particularly Enterobacter aerogenes, infection of a patient, comprising the steps of:

a) obtaining or providing a sample containing or suspected of containing at least one Enterobacter species, particularly Enterobacter aerogenes, from the patient;
b) determining the presence of at least one mutation in at least one gene from the group of genes listed in Table 5a, preferably Table 5c, wherein the presence of said at least one mutation is indicative of an antimicrobial drug, e.g. antibiotic, resistant Enterobacter, particularly Enterobacter aerogenes, infection in said patient.

[0250] According to certain embodiments, the twentieth aspect relates to a diagnostic method of determining an infection of a patient with Enterobacter species, particularly Enterobacter cloacae, potentially resistant to antimicrobial drug treatment, which can also be described as method of determining an antimicrobial drug, e.g. antibiotic, resistant Enterobacter, particularly Enterobacter cloacae, infection of a patient, comprising the steps of:

a) obtaining or providing a sample containing or suspected of containing at least one Enterobacter species, particularly Enterobacter cloacae, from the patient;
b) determining the presence of at least one mutation in at least one gene from the group of genes listed in Table 5b, preferably Table 5d, wherein the presence of said at least one mutation is indicative of an antimicrobial drug, e.g. antibiotic, resistant Enterobacter, particularly Enterobacter cloacae, infection in said patient.

[0251] A twenty-first aspect of the present invention is directed to a method of selecting a treatment of a patient suffering from an antimicrobial drug, e.g. antibiotic, resistant Enterobacter, particularly Enterobacter aerogenes and/or Enterobacter cloacae, infection, comprising the steps of:

a) obtaining or providing a sample containing or suspected of containing at least one Enterobacter species, particularly Enterobacter aerogenes and/or Enterobacter cloacae, from the patient;
b) determining the presence of at least one mutation in at least one gene from the group of genes listed in Table 5a and/or Table 5b, preferably Table 5c and/or Table 5d, wherein the presence of said at least one mutation is indicative of a resistance to one or more antimicrobial, e.g. antibiotic, drugs;
c) identifying said at least one or more antimicrobial, e.g. antibiotic, drugs; and
d) selecting one or more antimicrobial, e.g. antibiotic, drugs different from the ones identified in step c) and being suitable for the treatment of an Enterobacter, particularly Enterobacter aerogenes and/or Enterobacter cloacae, infection.

[0252] According to certain embodiments, the twenty-first aspect relates to a method of selecting a treatment of a patient suffering from an antimicrobial drug, e.g. antibiotic, resistant Enterobacter, particularly Enterobacter aerogenes, infection, comprising the steps of:

a) obtaining or providing a sample containing or suspected of containing at least one Enterobacter species, particularly Enterobacter aerogenes, from the patient;
b) determining the presence of at least one mutation in at least one gene from the group of genes listed in Table 5a, preferably Table 5c, wherein the presence of said at least one mutation is indicative of a resistance to one or more antimicrobial, e.g. antibiotic, drugs;
c) identifying said at least one or more antimicrobial, e.g. antibiotic, drugs; and
d) selecting one or more antimicrobial, e.g. antibiotic, drugs different from the ones identified in step c) and being suitable for the treatment of an Enterobacter, particularly Enterobacter aerogenes, infection.

[0253] According to certain embodiments, the twenty-first aspect relates to a method of selecting a treatment of a patient suffering from an antimicrobial drug, e.g. antibiotic, resistant Enterobacter, particularly Enterobacter cloacae, infection, comprising the steps of:

a) obtaining or providing a sample containing or suspected of containing at least one Enterobacter species, particularly Enterobacter cloacae, from the patient;
b) determining the presence of at least one mutation in at least one gene from the group of genes listed in Table 5b, preferably Table 5d, wherein the presence of said at least one mutation is indicative of a resistance to one or more antimicrobial, e.g. antibiotic, drugs;
c) identifying said at least one or more antimicrobial, e.g. antibiotic, drugs; and
d) selecting one or more antimicrobial, e.g. antibiotic, drugs different from the ones identified in step c) and being suitable for the treatment of an Enterobacter, particularly Enterobacter cloacae, infection.

[0254] Again, in the twentieth and the twenty-first aspect the steps correspond to those in the first or second aspect, although only a mutation in at least one gene is determined.

### EXAMPLES

[0255] The present invention will now be described in detail with reference to several examples thereof. However, these examples are illustrative and do not limit the scope of the invention.

### Example 1

[0256] Whole genome sequencing was carried out in addition to classical antimicrobial susceptibility testing of the same isofates for a cohort of 699 specimens, particularly 299 for Enterobacter aerogenes and 400 for Enterobacter cloacae. This allowed performing genome wide correlation studies to find genetic variants (e.g. point mutations, small insertions and deletion, larger structural variants, plasmid copy number gains, gene dosage effects) in the genome and plasmids that are significantly correlated to the resistance against one or several drugs. The approach also allows for comparing the relevant sites in the genome to each other.

[0257] In the approach the different sources of genetic resistance as well as the different ways of how bacteria can become resistant were covered. By measuring clinical isolates collected in a broad geographical area and across a broad time span of three decades a complete picture going far beyond the rather artificial step of laboratory generated resistance mechanisms was tried to be generated.

[0258] To this end, a set of 21 clinically relevant antimicrobial agents with 5 different modes of action was put together, and the minimally inhibitory concentration (MIC) of the 21 drugs for the Enterobacter isolates was measured.

[0259] The detailed procedure is given in the following:

### Bacterial Strains

[0260] The inventors selected 699 Enterobacter strains, particularly 299 for Enterobacter aerogenes and 400 for Enterobacter cloacae, from the microbiology strain collection at Siemens Healthcare Diagnostics (West Sacramento, Calif.) for susceptibility testing and whole genome sequencing.

### Antimicrobial Susceptibility Testing (AST) Panels

[0261] Frozen reference AST panels were prepared following Clinical Laboratory Standards Institute (CLSI) recommendations. The following antimicrobial agents (with μg/ml concentrations shown in parentheses) were included in the panels: Amoxicillin/K Clavulanate (0.5/0.25-64/32), Ampicillin (0.25-128), Ampicillin/Sulbactam (0.5/0.25-64/32), Aztreonam (0.25-64), Cefazolin (0.5-32), Cefepime (0.25-64), Cefotaxime (0.25-128), Ceftazidime (0.25-64), Ceftriaxone (0.25-128), Cefuroxime (1-64), Cephalothin (1-64), Ciprofloxacin (0.015-8), Ertepenem (0.12-32), Gentamicin (0.12-32), Imipenem (0.25-32), Levofloxacin (0.25-16), Meropenem (0.12-32), Piperacillin/Tazobactam (0.25/4-256/4), Tetracycline (0.5-64), Tobramycin (0.12-32), and Trimethoprim/Sulfamethoxazole (0.25/4.7-32/608). Prior to use with clinical isolates, AST panels were tested with QC strains. AST panels were considered acceptable for testing with clinical isolates when the QC results met QC ranges described by CLSI16.

### Inoculum Preparation

[0262] Isolates were cultured on trypticase soy agar with 5% sheep blood (BBL, Cockeysville, Md.) and incubated in ambient air at 35±1° C. for 18-24 h. Isolated colonies (4-5 large colonies or 5-10 small colonies) were transferred to a 3 ml Sterile Inoculum Water (Siemens) and emulsified to a final turbidity of a 0.5 McFarland standard. 2 ml of this suspension was added to 25 ml Inoculum Water with Pluronic-F (Siemens). Using the Inoculator (Siemens) specific for frozen AST panels, 5 μl of the cell suspension was transferred to each well of the AST panel. The inoculated AST panels were incubated in ambient air at 35±1° C. for 16-20 h. Panel results were read visually, and minimal inhibitory concentrations (MIC) were determined.

### DNA Extraction

[0263] Four streaks of each Gram-negative bacterial isolate cultured on trypticase soy agar containing 5% sheep blood and cell suspensions were made in sterile 1.5 ml collection tubes containing 50 μl Nuclease-Free Water (AM9930, Life Technologies). Bacterial isolate samples were stored at −20° C. until nucleic acid extraction. The Tissue Preparation System (TPS) (096D0382-02_01_B, Siemens) and the VERSANT® Tissue Preparation Reagents (TPR) kit (10632404B, Siemens) were used to extract DNA from these bacterial isolates. Prior to extraction, the bacterial isolates were thawed at room temperature and were pelleted at 2000 G for 5 seconds. The DNA extraction protocol DNAext was used for complete total nucleic acid extraction of 48 isolate samples and eluates, 50 μl each, in 4 hours. The total nucleic acid eluates were then transferred into 96-Well qPCR Detection Plates (401341, Agilent Technologies) for RNase A digestion, DNA quantitation, and plate DNA concentration standardization processes. RNase A (AM2271, Life Technologies) which was diluted in nuclease-free water following manufacturer's instructions was added to 50 μl of the total nucleic acid eluate for a final working concentration of 20 μg/ml. Digestion enzyme and eluate mixture were incubated at 37° C. for 30 minutes using Siemens VERSANT® Amplification and Detection instrument. DNA from the RNase digested eluate was quantitated using the Quant-iT™ PicoGreen dsDNA Assay (P11496, Life Technologies) following the assay kit instruction, and fluorescence was determined on the Siemens VERSANT® Amplification and Detection instrument. Data analysis was performed using Microsoft® Excel 2007. 25 μl of the quantitated DNA eluates were transferred into a new 96-Well PCR plate for plate DNA concentration standardization prior to library preparation. Elution buffer from the TPR kit was used to adjust DNA concentration. The standardized DNA eluate plate was then stored at −80° C. until library preparation.

### Next Generation Sequencing

[0264] Prior to library preparation, quality control of isolated bacterial DNA was conducted using a Qubit 2.0 Fluorometer (Qubit dsDNA BR Assay Kit, Life Technologies) and an Agilent 2200 TapeStation (Genomic DNA ScreenTape, Agilent Technologies). NGS libraries were prepared in 96 well format using NexteraXT DNA Sample Preparation Kit and NexteraXT Index Kit for 96 Indexes (Illumina) according to the manufacturer's protocol. The resulting sequencing libraries were quantified in a qPCR-based approach using the KAPA SYBR FAST qPCR MasterMix Kit (Peqlab) on a ViiA 7 real time PCR system (Life Technologies). 96 samples were pooled per lane for paired-end sequencing (2×100 bp) on Illumina Hiseq2000 or Hiseq2500 sequencers using TruSeq PE Cluster v3 and TruSeq SBS v3 sequencing chemistry (Illumina). Basic sequencing quality parameters were determined using the FastQC quality control tool for high throughput sequence data (Babraham Bioinformatics Institute).

### Data Analysis

[0265] Raw paired-end sequencing data for the 699 Enterobacter samples, particularly 299 for Enterobacter aerogenes and 400 for Enterobacter cloacae, were mapped against the Enterobacter references (NC_020181 for Enterobacter aerogenes, NC_021046 for Enterobacter cloacae) with BWA 0.6.1.20. The resulting SAM files were sorted, converted to BAM files, and PCR duplicates were marked using the Picard tools package 1.104 (http://picard.sourceforge.net/). The Genome Analysis Toolkit 3.1.1 (GATK)21 was used to call SNPs and indels for blocks of 200 Enterobacter samples (parameters: -ploidy 1-glm BOTH-stand_{—}call_conf 30-stand_emit_conf 10). VCF files were combined into a single file and quality filtering for SNPs was carried out (QD<2.0∥FS>60.0∥MQ<40.0) and indels (QD<2.0∥FS>200.0). Detected variants were annotated with SnpEff22 to predict coding effects. For each annotated position, genotypes of all Enterobacter samples were considered. Enterobacter samples were split into two groups, low resistance group (having lower MIC concentration for the considered drug), and high resistance group (having higher MIC concentrations) with respect to a certain MIC concentration (breakpoint). To find the best breakpoint all thresholds were evaluated and p-values were computed with Fisher's exact test relying on a 2×2 contingency table (number of Enterobacter samples having the reference or variant genotype vs. number of samples belonging to the low and high resistance group). The best computed breakpoint was the threshold yielding the lowest p-value for a certain genomic position and drug. For further analyses positions with non-synonymous alterations and p-value<10⁻¹⁰ were considered.

[0266] Since a potential reason for drug resistance is gene duplication, gene dose dependency was evaluated. For each sample the genomic coverage for each position was determined using BED Tools. Gene ranges were extracted from the reference assemblies NC_020181.gff and NC_021046.gff and the normalized median coverage per gene was calculated. To compare low- and high-resistance isolates the best area under the curve (AUC) value was computed. Groups of at least 20% of all samples having a median coverage larger than zero for that gene and containing more than 15 samples per group were considered in order to exclude artifacts and cases with AUC>0.75 were further evaluated.

[0267] To include data on the different ways how resistance mechanisms are acquired Enterobacter isolates collected over more than three decades were analyzed such that also horizontal gene transfer could potentially be discovered.

[0268] In detail, the following steps were carried out:

Enterobacter strains, particularly Enterobacter aerogenes and Enterobacter cloacae, to be tested were seeded on agar plates and incubated under growth conditions for 24 hours. Then, colonies were picked and incubated in growth medium in the presence of a given antibiotic drug in dilution series under growth conditions for 16-20 hours. Bacterial growth was determined by observing turbidity.

[0269] Next mutations were searched that are highly correlated with the results of the phenotypic resistance test.

[0270] For sequencing, samples were prepared using a Nextera library preparation, followed by multiplexed sequencing using the Illuminat HiSeq 2500 system, paired end sequencing. Data were mapped with BWA (Li H. and Durbin R. (2010) Fast and accurate long-read alignment with Burrows-Wheeler Transform. Bioinformatics, Epub. [PMID: 20080505]) and SNP were called using samtools (Li H.*, Handsaker B.*, Wysoker A., Fennell T., Ruan J., Homer N., Marth G., Abecasis G., Durbin R. and 1000 Genome Project Data Processing Subgroup (2009) The Sequence alignment/map (SAM) format and SAMtools. Bioinformatics, 25, 2078-9. [PMID: 19505943]).

[0271] As reference genomes, NC_020181 for Enterobacter aerogenes and NC_021046 for Enterobacter cloacae, as annotated at the NCBI were determined as best suited.

[0272] The mutations were matched to the genes and the amino acid changes were calculated. Using different algorithms (SVM, homology modeling) mutations leading to amino acid changes with likely pathogenicity/resistance were calculated.

[0273] In total, whole genomes and plasmids of 699 different clinical isolates of Enterobacter species, particularly 299 for Enterobacter aerogenes and 400 for Enterobacter cloacae, were sequenced, and classical antimicrobial susceptibility testing (AST) against 21 therapy forms as described above was performed for all organisms. From the classical AST two tables with 299, respectively 400 rows (isolates) and 21 columns (MIC values for 21 drugs) were obtained. Each table entry contained the MIC for the respective isolate and the respective drug. The genetic data were mapped to different reference genomes of Enterobacter that have been annotated at the NCBI (http://www.ncbi.nlm.nih.gov/), and the best reference was chosen as template for the alignment—NC_020181 for Enterobacter aerogenes and NC_021046 for Enterobacter cloacae as annotated at the NCBI. Additionally, assemblies were carried out and it was verified that the sequenced genomes fulfil all quality criteria to become reference genomes.

[0274] Next, genetic variants were evaluated. This approach resulted in a table with the genetic sites in columns and the same isolates in 299, respectively 400 rows. Each table entry contained the genetic determinant at the respective site (A, C, T, G, small insertions and deletions, . . . ) for the respective isolate.

[0275] In a next step different statistical tests were carried out
[0276] 1) For comparing resistance/susceptibility to genetic sites we calculated contingency tables and determined the significance using Fishers test
[0277] 2) For comparing different sites to each other the correlation between different genetic sites were calculated
[0278] 3) For detecting gene dosage effects, e.g. loss or gain of genes (in the genome or on plasmids) the coverage (i.e. how many read map to the current position) at each site for resistant and not resistant isolates was calculated.

[0279] From the data, first the 50 genes with the best p-value were chosen for the list of mutations as well as the list of correlated antibiotic resistance, representing Tables 1a and 1b and Tables 2a and 2b, respectively. As can be seen from Tables 1a and 1b and Tables 2a and 2b, differences between the tables can be observed, showing the necessity to carry out both steps for determining statistical significant data for antimicrobial drug, e.g. antibiotic, resistance profiles.

[0280] A full list of all genetic sites, drugs, drug classes, affected genes etc. is provided in Tables 3a and 3b and 4a, 4b, 4c, 4d, 4e, and 4f, wherein Table 3a corresponds to Table 1a (for Enterobacter aerogenes) and Table 3b corresponds to Table 1b (for Enterobacter cloacae), and they represent the genes having the lowest p-values after determining mutations in the genes. Tables 4a, 4b and 4c (for Enterobacter aerogenes) and Tables 4d, 4e, and 4f (for Enterobacter cloacae), respectively correspond to Tables 2a and 2b, respectively and represent the genes having the lowest p-values after correlating the mutations with antibiotic resistance for the respective antibiotics.

[0281] In addition, the data with the best p-values for each antibiotic class with the most antibiotic drugs as well as each antibiotic, respectively, were evaluated, being disclosed in Tables 5a, 5b, 6, 7a, 7b, 8a, 8b, 9, 10a and 10b.

[0282] In Tables 3-10b the columns are designated as follows:

Gene name: affected gene;
POS: genomic position of the SNP/variant in the Enterobacter reference genome (see above);
p-value: significance value calculated using Fishers exact test (determined according to FDR (Benjamini Hochberg) method (Benjamini Hochberg, 1995));
genbank protein accession number: (NCBI) Accession number of the corresponding protein of the genes

[0283] Also the antibiotic/drug classes, the number of significant antibiotics correlated to the mutations (over all antibiotics or over certain classes), as well as the correlated antibiotics are denoted in the Tables.

TABLE 3a
Detailed results for the genes in Example 1 for Enterobacter aerogenes (corresponding to Table 1a)

| | | #drug | | | genbank protein |
|---|---|---|---|---|---|
| POS | drug class | classes | p-value | gene name | accession number |
| 171368 | other (benzene derived)/sulfonamide; | 3 | 1.3483E−40 | ST548_p8085 | YP_007386513.1 |
| | quinolone*; aminoglycoside | | | | |
| 4648161 | quinolone* | 1 | 2.71131E−14 | ST548_p3778 | YP_007390820.1 |
| 2963787 | quinolone*; aminoglycoside | 2 | 1.01879E−11 | ST548_p5387 | YP_007389211.1 |
| 578343 | quinolone*; aminoglycoside | 2 | 9.05703E−11 | ST548_p7737 | YP_007386861.1 |
| 308760 | quinolone*; aminoglycoside | 2 | 9.76294E−11 | ST548_p7940 | YP_007386658.1 |
| 330342 | quinolone*; aminoglycoside | 2 | 9.76294E−11 | ST548_p7919 | YP_007386679.1 |
| 759640 | quinolone*; aminoglycoside | 2 | 9.76294E−11 | ST548_p7543 | YP_007387055.1 |
| 875320 | quinolone*; aminoglycoside | 2 | 9.76294E−11 | ST548_p7426 | YP_007387172.1 |
| 968582 | quinolone*; aminoglycoside | 2 | 9.76294E−11 | ST548_p7336 | YP_007387262.1 |
| 968583 | quinolone*; aminoglycoside | 2 | 9.76294E−11 | ST548_p7336 | YP_007387262.1 |
| 1075621 | quinolone*; aminoglycoside | 2 | 9.76294E−11 | ST548_p7239 | YP_007387359.1 |
| 1388768 | quinolone*; aminoglycoside | 2 | 9.76294E−11 | ST548_p6918 | YP_007387680.1 |
| 1456507 | quinolone*; aminoglycoside | 2 | 9.76294E−11 | ST548_p6844 | YP_007387754.1 |
| 1510620 | quinolone*; aminoglycoside | 2 | 9.76294E−11 | ST548_p6794 | YP_007387804.1 |
| 1688528 | quinolone*; aminoglycoside | 2 | 9.76294E−11 | ST548_p6618 | YP_007387980.1 |
| 1814445 | quinolone*; aminoglycoside | 2 | 9.76294E−11 | ST548_p6494 | YP_007388104.1 |
| 1828376 | quinolone*; aminoglycoside | 2 | 9.76294E−11 | ST548_p6478 | YP_007388120.1 |
| 1854623 | quinolone*; aminoglycoside | 2 | 9.76294E−11 | ST548_p6451 | YP_007388147.1 |
| 1923797 | quinolone*; aminoglycoside | 2 | 9.76294E−11 | ST548_p6386 | YP_007388212.1 |
| 1941154 | quinolone*; aminoglycoside | 2 | 9.76294E−11 | ST548_p6367 | YP_007388231.1 |
| 2270128 | quinolone*; aminoglycoside | 2 | 9.76294E−11 | ST548_p6066 | YP_007388532.1 |
| 2371346 | quinolone*; aminoglycoside | 2 | 9.76294E−11 | ST548_p5966 | YP_007388632.1 |
| 2430827 | quinolone*; aminoglycoside | 2 | 9.76294E−11 | ST548_p5904 | YP_007388694.1 |
| 2565704 | quinolone*; aminoglycoside | 2 | 9.76294E−11 | ST548_p5779 | YP_007388819.1 |
| 2685678 | quinolone*; aminoglycoside | 2 | 9.76294E−11 | ST548_p5658 | YP_007388940.1 |
| 2869308 | quinolone*; aminoglycoside | 2 | 9.76294E−11 | ST548_p5474 | YP_007389124.1 |
| 2895550 | quinolone*; aminoglycoside | 2 | 9.76294E−11 | ST548_p5447 | YP_007389151.1 |
| 3058970 | quinolone*; aminoglycoside | 2 | 9.76294E−11 | ST548_p5300 | YP_007389298.1 |
| 3109785 | quinolone*; aminoglycoside | 2 | 9.76294E−11 | ST548_p5259 | YP_007389339.1 |
| 3260880 | quinolone*; aminoglycoside | 2 | 9.76294E−11 | ST548_p5115 | YP_007389483.1 |
| 3294397 | quinolone*; aminoglycoside | 2 | 9.76294E−11 | ST548_p5081 | YP_007389517.1 |
| 3487655 | quinolone*; aminoglycoside | 2 | 9.76294E−11 | ST548_p4891 | YP_007389707.1 |
| 3548030 | quinolone*; aminoglycoside | 2 | 9.76294E−11 | ST548_p4836 | YP_007389762.1 |
| 3832969 | quinolone*; aminoglycoside | 2 | 9.76294E−11 | ST548_p4577 | YP_007390021.1 |
| 4106378 | quinolone*; aminoglycoside | 2 | 9.76294E−11 | ST548_p4310 | YP_007390288.1 |
| 4230886 | quinolone*; aminoglycoside | 2 | 9.76294E−11 | ST548_p4203 | YP_007390395.1 |
| 4332930 | quinolone*; aminoglycoside | 2 | 9.76294E−11 | ST548_p4107 | YP_007390491.1 |
| 4831706 | quinolone*; aminoglycoside | 2 | 9.76294E−11 | ST548_p3593 | YP_007391005.1 |
| 4982236 | quinolone*; aminoglycoside | 2 | 9.76294E−11 | ST548_p3452 | YP_007391146.1 |
| 303522 | quinolone*; aminoglycoside | 2 | 9.89834E−11 | ST548_p7944 | YP_007386654.1 |
| 4964839 | quinolone*; aminoglycoside | 2 | 9.89834E−11 | ST548_p3464 | YP_007391134.1 |
| 1013168 | quinolone*; aminoglycoside | 2 | 1.00023E−10 | ST548_p7296 | YP_007387302.1 |
| 3112563 | quinolone*; aminoglycoside | 2 | 1.00023E−10 | ST548_p5257 | YP_007389341.1 |
| 4048371 | quinolone*; aminoglycoside | 2 | 1.00023E−10 | ST548_p4364 | YP_007390234.1 |
| 4295968 | quinolone*; aminoglycoside | 2 | 1.00023E−10 | ST548_p4137 | YP_007390461.1 |
| 3790746 | quinolone*; aminoglycoside | 2 | 1.04396E−10 | ST548_p4611 | YP_007389987.1 |
| 3542747 | quinolone*; aminoglycoside | 2 | 1.15374E−10 | ST548_p4841 | YP_007389757.1 |
| 407759 | quinolone*; aminoglycoside | 2 | 1.19412E−10 | ST548_p7855 | YP_007386743.1 |
| 1229270 | quinolone*; aminoglycoside | 2 | 1.19412E−10 | ST548_p7086 | YP_007387512.1 |
| 1487307 | quinolone*; aminoglycoside | 2 | 1.19412E−10 | ST548_p6814 | YP_007387784.1 |
| 3014838 | quinolone*; aminoglycoside | 2 | 1.19412E−10 | ST548_p5341 | YP_007389257.1 |

*fluoroquinolone

TABLE 3b
Detailed results for the genes in Example 1 for Enterobacter cloacae (corresponding to Table 1b)

| | | #drug | | | genbank protein |
|---|---|---|---|---|---|
| POS | drug class | classes | p-value | gene name | accession number |
| 4019444 | other (benzene derived)/sulfonamide; | 5 | 1.27243E−44 | ENC_39630 | YP_007847284.1 |
| | polyketide (tetracycline); quinolone | | | | |
| | (fluoroquinolone); Lactams; aminoglycoside | | | | |
| 3290230 | quinolone (fluoroquinolone); polyketide | 4 | 1.57067E−27 | ENC_32540 | YP_007846710.1 |
| | (tetracycline); Lactams; aminoglycoside | | | | |
| 2054358 | Lactams | 1 | 1.49296E−13 | ENC_20090 | YP_007845743.1 |
| 2054359 | Lactams | 1 | 1.49296E−13 | ENC_20090 | YP_007845743.1 |
| 3460705 | Lactams | 1 | 1.55334E−13 | ENC_34110 | YP_007846839.1 |
| 1963119 | Lactams | 1 | 1.44156E−12 | ENC_19160 | YP_007845675.1 |
| 1694 | Lactams | 1 | 1.7243E−12 | ENC_00130 | YP_007844194.1 |
| 3960409 | Lactams | 1 | 1.91523E−12 | ENC_39120 | YP_007847242.1 |
| 2398200 | Lactams | 1 | 1.9358E−12 | ENC_23520 | YP_007845986.1 |
| 3537025 | Lactams | 1 | 1.97506E−12 | ENC_34890 | YP_007846910.1 |
| 173905 | Lactams | 1 | 3.10168E−12 | ENC_01640 | YP_007844327.1 |
| 178991 | Lactams | 1 | 3.10168E−12 | ENC_01700 | YP_007844333.1 |
| 1333048 | Lactams | 1 | 3.10168E−12 | ENC_12700 | YP_007845174.1 |
| 746244 | Lactams | 1 | 3.55985E−12 | ENC_07150 | YP_007844781.1 |
| 1892158 | Lactams | 1 | 3.55985E−12 | ENC_18520 | YP_007845625.1 |
| 383581 | Lactams | 1 | 4.21349E−12 | ENC_03650 | YP_007844492.1 |
| 384468 | Lactams | 1 | 4.21349E−12 | ENC_03660 | YP_007844493.1 |
| 1030349 | Lactams | 1 | 4.21349E−12 | ENC_09780 | YP_007844967.1 |
| 1872389 | Lactams | 1 | 4.21349E−12 | ENC_18300 | YP_007845610.1 |
| 2195955 | Lactams | 1 | 4.21349E−12 | ENC_21490 | YP_007845840.1 |
| 4326453 | Lactams | 1 | 4.21349E−12 | ENC_42450 | YP_007847482.1 |
| 4693856 | Lactams | 1 | 4.21349E−12 | ENC_45970 | YP_007847766.1 |
| 725344 | Lactams | 1 | 5.22019E−12 | ENC_06960 | YP_007844767.1 |
| 4325136 | Lactams | 1 | 6.53429E−12 | ENC_42440 | YP_007847481.1 |
| 4580729 | Lactams | 1 | 6.53429E−12 | ENC_44970 | YP_007847688.1 |
| 1567468 | Lactams | 1 | 8.09722E−12 | ENC_15210 | YP_007845371.1 |
| 4326252 | Lactams | 1 | 8.09722E−12 | ENC_42450 | YP_007847482.1 |
| 1648963 | Lactams | 1 | 8.63835E−12 | ENC_16040 | YP_007845434.1 |
| 1935940 | Lactams | 1 | 9.44354E−12 | ENC_18950 | YP_007845657.1 |
| 3478558 | Lactams | 1 | 9.44354E−12 | ENC_34310 | YP_007846858.1 |
| 503770 | Lactams | 1 | 1.01981E−11 | ENC_04740 | YP_007844588.1 |
| 2682222 | Lactams | 1 | 1.06967E−11 | ENC_26480 | YP_007846232.1 |
| 482161 | Lactams | 1 | 1.09811E−11 | ENC_04560 | YP_007844571.1 |
| 2157120 | Lactams | 1 | 1.09811E−11 | ENC_21110 | YP_007845812.1 |
| 1796041 | Lactams | 1 | 1.31718E−11 | ENC_17620 | YP_007845557.1 |
| 4325190 | Lactams | 1 | 1.33507E−11 | ENC_42440 | YP_007847481.1 |
| 1635457 | Lactams | 1 | 1.40255E−11 | ENC_15900 | YP_007845422.1 |
| 1871996 | Lactams | 1 | 1.40255E−11 | ENC_18290 | YP_007845609.1 |
| 1872000 | Lactams | 1 | 1.40255E−11 | ENC_18290 | YP_007845609.1 |
| 2647657 | Lactams | 1 | 1.40255E−11 | ENC_26190 | YP_007846206.1 |
| 2844012 | Lactams | 1 | 1.40255E−11 | ENC_28140 | YP_007846360.1 |
| 4371994 | Lactams | 1 | 1.40255E−11 | ENC_42910 | YP_007847517.1 |
| 499197 | Lactams | 1 | 1.41425E−11 | ENC_04700 | YP_007844584.1 |
| 2939786 | Lactams | 1 | 1.43216E−11 | ENC_29120 | YP_007846430.1 |
| 928430 | Lactams | 1 | 1.49143E−11 | ENC_08830 | YP_007844896.1 |
| 3385544 | Lactams | 1 | 1.49143E−11 | ENC_33440 | YP_007846782.1 |
| 1882721 | Lactams | 1 | 1.49405E−11 | ENC_18400 | YP_007845616.1 |
| 3231503 | Lactams | 1 | 1.54711E−11 | ENC_32020 | YP_007846668.1 |
| 4347833 | Lactams | 1 | 1.57828E−11 | ENC_42660 | YP_007847500.1 |
| 1415838 | Lactams | 1 | 1.6053E−11 | ENC_13620 | YP_007845245.1 |
| 2585931 | Lactams | 1 | 1.61753E−11 | ENC_25610 | YP_007846163.1 |
| 222650 | Lactams | 1 | 1.63132E−11 | ENC_02110 | YP_007844366.1 |
| 268130 | Lactams | 1 | 1.63132E−11 | ENC_02570 | YP_007844400.1 |
| 691829 | Lactams | 1 | 1.63132E−11 | ENC_06620 | YP_007844742.1 |

TABLE 4a
Detailed results for the genes in Example 1 for
Enterobacter aerogenes (corresponding to Table 2a)

| | | | | #drug |
|---|---|---|---|---|
| POS | drug | #drugs | drug class | classes |
| 171368 | T/S; LVX; | 4 | other (benzene derived)/ | 3 |
| | CP; TO | | sulfonamide; quinolone | |
| | | | (fluoroquinolone); | |
| | | | aminoglycoside | |
| 4648161 | CP; LVX | 2 | quinolone(fluoroquinolone) | 1 |
| 2963787 | LVX; CP; | 3 | quinolone(fluoroquinolone); | 2 |
| | TO | | aminoglycoside | |
| 578343 | LVX; CP; | 3 | quinolone(fluoroquinolone); | 2 |
| | TO | | aminoglycoside | |
| 2685678 | LVX; CP; | 3 | quinolone(fluoroquinolone); | 2 |
| | TO | | aminoglycoside | |
| 4106378 | LVX; CP; | 3 | quinolone(fluoroquinolone); | 2 |
| | TO | | aminoglycoside | |

TABLE 4b
Detailed results for the genes in Example 1 for Enterobacter aerogenes
(corresponding to Table 2a, continued)

| | | | | | #significant | #significant other |
|---|---|---|---|---|---|---|
| | best | #significant | #significant | #significant | polyketide | (benzene derived)/ |
| POS | drug | Lactams | fluoroquinolones | aminoglycosides | (tetracycline) | sulfonamide |
| 171368 | CP | 0 | 2 | 1 | 0 | 1 |
| 4648161 | CP | 0 | 2 | 0 | 0 | 0 |
| 2963787 | CP | 0 | 2 | 1 | 0 | 0 |
| 578343 | CP | 0 | 2 | 1 | 0 | 0 |
| 2685678 | CP | 0 | 2 | 1 | 0 | 0 |
| 4106378 | CP | 0 | 2 | 1 | 0 | 0 |

TABLE 4c
Detailed results for the genes in Example 1 for Enterobacter aerogenes
(corresponding to Table 2a, continued)

| | | | genbank protein |
|---|---|---|---|
| POS | p-value | gene name | accession number |
| 171368 | 1.3483E−40 | ST548_p8085 | YP_007386513.1 |
| 4648161 | 2.71131E−14 | ST548_p3778 | YP_007390820.1 |
| 2963787 | 1.01879E−11 | ST548_p5387 | YP_007389211.1 |
| 578343 | 9.05703E−11 | ST548_p7737 | YP_007386861.1 |
| 2685678 | 9.76294E−11 | ST548_p5658 | YP_007388940.1 |
| 4106378 | 9.76294E−11 | ST548_p4310 | YP_007390288.1 |

TABLE 4d
Detailed results for the genes in Example 1 for
Enterobacter cloacae (corresponding to Table 2b)

| | | | | #drug |
|---|---|---|---|---|
| POS | drug | #drugs | drug class | classes |
| 4019444 | T/S; TE; CFT; | 14 | other (benzene | 5 |
| | LVX; GM; CRM; | | derived)/ | |
| | ETP; CP; CAX; | | sulfonamide; | |
| | AZT; P/T; CPE; | | polyketide*; | |
| | CAZ; TO | | fluoroquinolone; | |
| | | | Lactams; | |
| | | | aminoglycoside | |
| 3290230 | LVX; TE; CPE; | 5 | fluoroquinolone; | 4 |
| | CP; GM | | polyketide*; | |
| | | | Lactams; | |
| | | | aminoglycoside | |
| 2054358 | CAZ; CFT; CPE; | 5 | Lactams | 1 |
| | P/T; CAX | | | |
| 4557569 | LVX; CP; TO | 3 | fluoroquinolone; | 2 |
| | | | aminoglycoside | |
| 4791743 | CAZ; CFT; CPE; | 5 | Lactams | 1 |
| | P/T; CAX | | | |
| 3833518 | CP; LVX | 2 | fluoroquinolone | 1 |
| 438917 | CP; LVX | 2 | fluoroquinolone | 1 |
| 2674813 | CP; LVX | 2 | fluoroquinolone | 1 |
| 611929 | CP; LVX | 2 | fluoroquinolone | 1 |
| 4428726 | CP; LVX | 2 | fluoroquinolone | 1 |
| 3888032 | CP; LVX | 2 | fluoroquinolone | 1 |
| 3076462 | CP; LVX | 2 | fluoroquinolone | 1 |

*(tetracycline)

TABLE 4e
Detailed results for the genes in Example 1 for Enterobacter cloacae
(corresponding to Table 2b, continued)

| | | | | | #significant | #significant other |
|---|---|---|---|---|---|---|
| | best | #significant | #significant | #significant | polyketide | (benzene derived)/ |
| POS | drug | Lactams | fluoroquinolones | aminoglycosides | (tetracycline) | sulfonamide |
| 4019444 | LVX | 8 | 2 | 2 | 1 | 1 |
| 3290230 | CP | 1 | 2 | 1 | 1 | 0 |
| 2054358 | CPE | 5 | 0 | 0 | 0 | 0 |
| 4557569 | CP | 0 | 2 | 1 | 0 | 0 |
| 4791743 | CPE | 5 | 0 | 0 | 0 | 0 |
| 3833518 | LVX | 0 | 2 | 0 | 0 | 0 |
| 438917 | CP | 0 | 2 | 0 | 0 | 0 |
| 2674813 | CP | 0 | 2 | 0 | 0 | 0 |
| 611929 | LVX | 0 | 2 | 0 | 0 | 0 |
| 4428726 | LVX | 0 | 2 | 0 | 0 | 0 |
| 3888032 | CP | 0 | 2 | 0 | 0 | 0 |
| 3076462 | LVX | 0 | 2 | 0 | 0 | 0 |

TABLE 4f
Detailed results for the genes in Example 1 for Enterobacter cloacae
(corresponding to Table 2b, continued)

| | | | genbank protein |
|---|---|---|---|
| POS | p-value | gene name | accession number |
| 4019444 | 1.27243E−44 | ENC_39630 | YP_007847284.1 |
| 3290230 | 1.57067E−27 | ENC_32540 | YP_007846710.1 |
| 2054358 | 1.49296E−13 | ENC_20090 | YP_007845743.1 |
| 4557569 | 5.1957E−11 | ENC_44710 | YP_007847666.1 |
| 4791743 | 5.1957E−11 | ENC_46830 | YP_007847834.1 |
| 3833518 | 7.54177E−11 | ENC_37880 | YP_007847147.1 |
| 438917 | 8.56385E−11 | ENC_04160 | YP_007844534.1 |
| 2674813 | 8.56385E−11 | ENC_26410 | YP_007846226.1 |
| 611929 | 9.62793E−11 | ENC_05800 | YP_007844680.1 |
| 4428726 | 1.43181E−10 | ENC_43540 | YP_007847570.1 |
| 3888032 | 3.2269E−10 | ENC_38400 | YP_007847188.1 |
| 3076462 | 5.0671E−10 | ENC_30490 | YP_007846541.1 |

[0284] The p-value was calculated using the Fisher exact test based on contingency table with 4 fields: #samples Resistant/wild type; #samples Resistant/mutant; #samples not Resistant/wild type; #samples not Resistant/mutant

[0285] The test is based on the distribution of the samples in the 4 fields. Even distribution indicates no significance, while clustering into two fields indicates significance.

[0286] The following results were obtained for Enterobacter aerogenes:
[0287] A total of 143 different correlations between genetic sites and anti-microbial agents were detected (p-value<10⁻¹⁰).
[0288] The biggest part of these were point mutations (i.e. single base exchanges)
[0289] The highest significance that was reached was 10⁻⁴⁰ for a mutation in YP_007386513.1, particularly in position 171368 with regard to reference genome NC_020181 as annotated at the NCBI, particularly being a codon change aTc/aCc
[0290] Besides these, insertions or deletions of up to four bases were discovered
[0291] Further, potential genetic tests for three different drug classes relating to resistances were discovered
   [0292] Quinolones, particularly Fluoroquinolones
   [0293] Aminoglycosides
   [0294] Folate synthesis inhibitors
[0295] Potential genetic tests for the tested drugs/drug combinations were discovered:

[0296] Amoxicillin/Clavulanate, Ampicillin, Ampicillin/Sulbactam, Aztreonam, Cefazolin, Cefepime, Ceftazidime, Cefuroxime, Cephalothin, Imipenem, Piperacillin/Tazobactam, Ciprofloxacin, Levofloxacin, Gentamycin, Tobramycin, Tetracycline, Trimethoprim/Sulfamethoxazol
[0297] Mutations were observed in 133 different genes

[0298] The following results were obtained for Enterobacter cloacae:
[0299] A total of 4.681 different correlations between genetic sites and anti-microbial agents were detected (p-value<10⁻¹⁰).
[0300] The biggest part of these were point mutations (i.e. single base exchanges)
[0301] The highest significance that was reached was 10⁻⁴⁴ for a mutation in YP_007847284.1, and the highest significances were observed in YP_007847284.1 and YP_007846710.1, particularly in positions 4019444 and 3290230, respectively, with regard to reference genome NC_020181 as annotated at the NCBI, particularly being codon changes tCc/tTc;tCc/tAc and aGc/aTc, respectively
[0302] Besides these, insertions or deletions of up to four bases were discovered
[0303] Further, potential genetic tests for five different drug classes relating to resistances were discovered
   [0304] β-lactams (includes Penicillins, Cephalosporins, Carbapenems, Monobactams)
   [0305] Quinolones, particularly Fluoroquinolones
   [0306] Aminoglycosides
   [0307] Polyketides, particularly Tetracyclines
   [0308] Folate synthesis inhibitors
[0309] Potential genetic tests for the tested drugs/drug combinations were discovered:
   Amoxicillin/Clavulanate, Ampicillin, Ampicillin/Sulbactam, Aztreonam, Cefazolin, Cefepime, Ceftazidime, Cefuroxime, Cephalothin, Imipenem, Piperacillin/Tazobactam, Ciprofloxacin, Levofloxacin, Gentamycin, Tobramycin, Tetracycline, Trimethoprim/Sulfamethoxazol
[0310] Mutations were observed in 1.407 different genes

[0311] While in the tables only the best mutations in each gene are represented, a manifold of different SNPs has been found for each gene. Examples for multiple SNPs for two of the genes given in Tables 3a and 3b are shown in the following Tables (for E. aerogenes), 12 (for E. cloacae) and 13 (for E. cloacae).

TABLE 11
Statistically significant SNPs in gene ST548_p7336 of E. aerogenes
(genbank protein accession number YP_007387262.1) (headers
as in Tables 3, particularly 3a, and 4, respectively)

| | | | | best | |
|---|---|---|---|---|---|
| POS | drug | #drugs | drug class | drug | p-value |
| 968450 | CP; TO | 2 | fluoroquinolone; | TO | 2.3629E−010 |
| | | | aminoglycoside | | |
| 968458 | CP; TO | 2 | fluoroquinolone; | TO | 3.4979E−010 |
| | | | aminoglycoside | | |
| 968582 | CP; TO | 2 | fluoroquinolone; | CP | 9.7629E−011 |
| | | | aminoglycoside | | |
| 968595 | CP; TO | 2 | fluoroquinolone; | TO | 6.0416E−010 |
| | | | aminoglycoside | | |
| 968583 | CP; TO | 2 | fluoroquinolone; | CP | 9.7629E−011 |
| | | | aminoglycoside | | |
| 968463 | TO | 1 | aminoglycoside | TO | 4.5959E−010 |

TABLE 12
Statistically significant SNPs in gene ENC_00130 of E. cloacae
(genbank protein accession number YP_007844194.1) (headers
as in Tables 3, particularly 3b, and 4, respectively)

| | | | | best | |
|---|---|---|---|---|---|
| POS | drug | #drugs | drug class | drug | p-value |
| 1845 | CPE | 1 | Lactams | CPE | 8.5638E−011 |
| 1895 | CPE | 1 | Lactams | CPE | 1.1802E−010 |
| 1691 | CPE | 1 | Lactams | CPE | 2.6316E−010 |
| 1694 | CAZ; CPE | 2 | Lactams | CPE | 1.7243E−012 |
| 1886 | CPE | 1 | Lactams | CPE | 1.2136E−010 |

TABLE 13
Statistically significant SNPs in gene ENC_01700 of E. cloacae
(genbank protein accession number YP_007844333.1) (headers
as in Tables 3, particularly 3b, and 4, respectively)

| | | | | best | |
|---|---|---|---|---|---|
| POS | drug | #drugs | drug class | drug | p-value |
| 178991 | CPE | 1 | Lactams | CPE | 3.1017E−012 |
| 179361 | CPE | 1 | Lactams | CPE | 2.7556E−010 |
| 178992 | CPE | 1 | Lactams | CPE | 1.6404E−011 |
| 178998 | CPE | 1 | Lactams | CPE | 8.5638E−011 |
| 180482 | CPE | 1 | Lactams | CPE | 6.2839E−010 |
| 180444 | CPE | 1 | Lactams | CPE | 8.5638E−011 |

[0312] Similar results were obtained for other genes but are omitted for the sake of brevity.

[0313] Further, a synergistic effect of individual SNPs was demonstrated by exhaustively comparing significance levels for association of single SNPs with antibiotic susceptibility/resistance and significance levels for association of combinations of SNPs with antibiotic susceptibility/resistance. For a representative example of 2 SNPs the significance level for synergistic association of two SNPs was improved with the values given in Tables 14 (for E. aerogenes), 15 (for E. cloacae, for genes in Table 1b) and 16 (for E. cloacae, for genes in Table 2b) compared to the association of either SNP alone, given for exemplary different antibiotics.

TABLE 14
Synergistic increase for association of two SNPs in E. aerogenes

| drug | POS 1 | Ref | Alt | POS 2 | Ref | Alt | Improv [%] |
|---|---|---|---|---|---|---|---|
| CP | 4648161 | T | G | 171368 | T | C | 1765.2 |

POS 1, 2 = position 1, 2 used for combination;
Ref = reference base;
Alt = alternated base in samples;
improv = improvement compared to minimum p-value of single SNP
The improvement of 1765.2% in the example with positions 4648161 and 171368 for CP results from a p-value change from 1.61063e−37 to 9.12453e−39.

TABLE 15
Synergistic increase for association of two
SNPs in E. cloacae (genes in Table 1b)

| drug | POS 1 | Ref | Alt | POS 2 | Ref | Alt | Improv [%] |
|---|---|---|---|---|---|---|---|
| CP | 4693856 | A | C, G | 3290230 | C | A | 1755.7 |
| LVX | 4693856 | A | C, G | 3290230 | C | A | 13100.4 |
| CP | 4580729 | T | G | 3290230 | C | A | 706.2 |
| LVX | 4580729 | T | G | 3290230 | C | A | 8959.4 |
| LVX | 4371994 | G | A | 3290230 | C | A | 791.0 |
| CP | 928430 | C | A | 3290230 | C | A | 142.8 |
| CP | 1415838 | A | T | 3290230 | C | A | 174.1 |
| LVX | 1415838 | A | T | 3290230 | C | A | 1260.3 |
| LVX | 1567468 | C | T | 3290230 | C | A | 130.8 |
| CP | 1635457 | G | T | 3290230 | C | A | 283.6 |
| LVX | 1635457 | | | 3290230 | C | A | 4307.5 |
| LVX | 2054358 | C | T | 3290230 | C | A | 497.8 |
| CP | 2195955 | A | T | 3290230 | C | A | 2158.6 |
| LVX | 2195955 | A | T | 3290230 | C | A | 33721.6 |
| LVX | 3290230 | C | A | 3460705 | C | A | 15910.5 |
| CP | 3290230 | C | A | 3478558 | C | G | 336.3 |
| LVX | 3290230 | C | A | 3478558 | C | G | 5869.0 |
| CP | 3290230 | C | A | 3537025 | C | A | 2342.0 |
| LVX | 3290230 | C | A | 3537025 | C | A | 64642.9 |
| CP | 3290230 | C | A | 4019444 | C | A, T | 36788.7 |
| LVX | 3290230 | C | A | 4019444 | C | A, T | 14673199.3 |
| CP | 3290230 | C | A | 2844012 | C | A, T | 355.0 |
| LVX | 3290230 | C | A | 2844012 | C | A, T | 5117.3 |
| CP | 3290230 | C | A | 2398200 | T | G | 110.4 |
| LVX | 3290230 | C | A | 2398200 | T | G | 4643.3 |
| CP | 3290230 | C | A | 173905 | G | A | 416.3 |
| LVX | 3290230 | C | A | 173905 | G | A | 3737.4 |
| CP | 3290230 | C | A | 2682222 | G | C, T | 310.7 |
| LVX | 3290230 | C | A | 2682222 | G | C, T | 2789.6 |
| CP | 3290230 | C | A | 2647657 | G | C, T | 38628.2 |
| LVX | 3290230 | C | A | 2647657 | G | C, T | 12721.9 |
| CP | 3290230 | C | A | 1333048 | G | A | 5134.4 |
| LVX | 3290230 | C | A | 1333048 | G | A | 44688.4 |
| CP | 3290230 | C | A | 503770 | G | A, C | 13185.1 |
| LVX | 3290230 | C | A | 503770 | G | A, C | 714520.5 |
| CP | 3290230 | C | A | 4326453 | C | A | 301.2 |
| LVX | 3290230 | C | A | 4326453 | C | A | 10240.3 |
| LVX | 3290230 | C | A | 4325136 | A | G | 3092.5 |

POS 1, 2 = position 1, 2 used for combination;
Ref = reference base;
Alt = alternated base in samples;
improv = improvement compared to minimum p-value of single SNP

[0314] For example, the improvement of 3092.5% in the last example with positions 3290230 and 4325136 for LVX results from a p-value change from 1.37267e-28 to 4.4387e-30.

TABLE 15
Synergistic increase for association of two
SNPs in E. cloacae (genes in Table 2b)

| drug | POS 1 | Ref | Alt | POS 2 | Ref | Alt | Improv [%] |
|---|---|---|---|---|---|---|---|
| CP | 3290230 | C | A | 3833518 | C | G | 4380.9 |
| LVX | 3290230 | C | A | 3833518 | C | G | 112471.0 |
| CP | 3290230 | C | A | 3888032 | G | A | 557.1 |
| CP | 3290230 | C | A | 438917 | C | T | 2511.1 |
| CP | 3290230 | C | A | 2674813 | T | G | 3206.3 |
| LVX | 3290230 | C | A | 2674813 | T | G | 609.6 |

POS 1, 2 = position 1, 2 used for combination;
Ref = reference base;
Alt = alternated base in samples;
improv = improvement compared to minimum p-value of single SNP

[0315] For example, the improvement of 609.6% in the last example with positions 3290230 and 2674813 for LVX results from a p-value change from 1.37267e-28 to 2.25174e-29.

[0316] Again, similar results were obtained for other SNPs in respective genes.

[0317] A genetic test for the combined pathogen identification and antimicrobial susceptibility testing direct from the patient sample can reduce the time-to actionable result significantly from several days to hours, thereby enabling targeted treatment. Furthermore, this approach will not be restricted to central labs, but point of care devices can be developed that allow for respective tests. Such technology along with the present methods and computer program products could revolutionize the care, e.g. in intense care units or for admissions to hospitals in general. Furthermore, even applications like real time outbreak monitoring can be achieved using the present methods.

[0318] Instead of using only single variants, a combination of several variant positions can improve the prediction accuracy and further reduce false positive findings that are influenced by other factors.

[0319] Compared to approaches using MALDI-TOF MS, the present approach has the advantage that it covers almost the complete genome and thus enables us to identify the potential genomic sites that might be related to resistance. While MALDI-TOF MS can also be used to identify point mutations in bacterial proteins, this technology only detects a subset of proteins and of these not all are equally well covered. In addition, the identification and differentiation of certain related strains is not always feasible.

[0320] The present method allows computing a best breakpoint for the separation of isolates into resistant and susceptible groups. The inventors designed a flexible software tool that allows to consider—besides the best breakpoints—also values defined by different guidelines (e.g. European and US guidelines), preparing for an application of the GAST in different countries.

[0321] The inventors demonstrate that the present approach is capable of identifying mutations in genes that are already known as drug targets, as well as detecting potential new target sites.

[0322] The current approach enables
[0323] a. Identification and validation of markers for genetic identification and susceptibility/resistance testing within one diagnostic test
[0324] b. validation of known drug targets and modes of action
[0325] c. detection of potentially novel resistance mechanisms leading to putative novel target/secondary target genes for new therapies

1. A diagnostic method of determining an infection of a patient with Enterobacter species potentially resistant to antimicrobial drug, e.g. antibiotic, treatment, comprising the steps of:
a) obtaining or providing a sample containing or suspected of containing at least one Enterobacter species from the patient;
b) determining the presence of at least one mutation in at least two genes from the group of genes consisting of ST548_p8085, ST548_p3778, ST548_p5387, ST548_p7737, ST548_p7940, ST548_p7919, ST548_p7543, ST548_p7426, ST548_p7336, ST548_p7239, ST548_p6918, ST548_p6844, ST548_p6794, ST548_p6618, ST548_p6494, ST548_p6478, ST548_p6451, ST548_p6386, ST548_p6367, ST548_p6066, ST548_p5966, ST548_p5904, ST548_p5779, ST548_p5658, ST548_p5474, ST548_p5447, ST548_p5300, ST548_p5259, ST548_p5115, ST548_p5081, ST548_p4891, ST548_p4836, ST548_p4577, ST548_p4310, ST548_p4203, ST548_p4107, ST548_p3593, ST548_p3452, ST548_p7944, ST548_p3464, ST548_p7296, ST548_p5257, ST548_p4364, ST548_p4137, ST548_p4611, ST548_p4841, ST548_p7855, ST548_p7086, ST548_p6814, and ST548_p5341, and/or ENC_39630, ENC_32540, ENC_20090, ENC_34110, ENC_19160, ENC_00130, ENC_39120, ENC_23520, ENC_34890, ENC_01640, ENC_01700, ENC_12700, ENC_07150, ENC_18520, ENC_03650, ENC_03660, ENC_09780, ENC_18300, ENC_21490, ENC_42450, ENC_45970, ENC_06960, ENC_42440, ENC_44970, ENC_15210, ENC_16040, ENC_18950, ENC_34310, ENC_04740, ENC_26480, ENC_04560, ENC_21110, ENC_17620, ENC_15900, ENC_18290, ENC_26190, ENC_28140, ENC_42910, ENC_04700, ENC_29120, ENC_08830, ENC_33440, ENC_18400, ENC_32020, ENC_42660, ENC_13620, ENC_25610, ENC_02110, ENC_02570, and ENC_06620, or from the group of genes consisting of ST548_p8085, ST548_p3778, ST548_p5387, ST548_p7737, ST548_p5658, and ST548_p4310, and/or ENC_39630, ENC_32540, ENC_20090, ENC_44710, ENC_46830, ENC_37880, ENC_04160, ENC_26410, ENC_05800, ENC_43540, ENC_38400, and ENC_30490, wherein the presence of said at least two mutations is indicative of an infection with an antimicrobial drug, e.g. antibiotic, resistant Enterobacter strain in said patient.

2. A method of selecting a treatment of a patient suffering from an infection with a potentially resistant Enterobacter strain, comprising the steps of:
a) obtaining or providing a sample containing or suspected of containing at least one Enterobacter species from the patient;
b) determining the presence of at least one mutation in at least two genes from the group of genes consisting of ST548_p8085, ST548_p3778, ST548_p5387, ST548_p7737, ST548_p7940, ST548_p7919, ST548_p7543, ST548_p7426, ST548_p7336, ST548_p7239, ST548_p6918, ST548_p6844, ST548_p6794, ST548_p6618, ST548_p6494, ST548_p6478, ST548_p6451, ST548_p6386, ST548_p6367, ST548_p6066, ST548_p5966, ST548_p5904, ST548_p5779, ST548_p5658, ST548_p5474, ST548_p5447, ST548_p5300, ST548_p5259, ST548_p5115, ST548_p5081, ST548_p4891, ST548_p4836, ST548_p4577, ST548_p4310, ST548_p4203, ST548_p4107, ST548_p3593, ST548_p3452, ST548_p7944, ST548_p3464, ST548_p7296, ST548_p5257, ST548_p4364, ST548_p4137, ST548_p4611, ST548_p4841, ST548_p7855, ST548_p7086, ST548_p6814, and ST548_p5341, and/or ENC_39630, ENC_32540, ENC_20090, ENC_34110, ENC_19160, ENC_00130, ENC_39120, ENC_23520, ENC_34890, ENC_01640, ENC_01700, ENC_12700, ENC_07150, ENC_18520, ENC_03650, ENC_03660, ENC_09780, ENC_18300, ENC_21490, ENC_42450, ENC_45970, ENC_06960, ENC_42440, ENC_44970, ENC_15210, ENC_16040, ENC_18950, ENC_34310, ENC_04740, ENC_26480, ENC_04560, ENC_21110, ENC_17620, ENC_15900, ENC_18290, ENC_26190, ENC_28140, ENC_42910, ENC_04700, ENC_29120, ENC_08830, ENC_33440, ENC_18400, ENC_32020, ENC_42660, ENC_13620, ENC_25610, ENC_02110, ENC_02570, and ENC_06620, or from the group of genes consisting of ST548_p8085, ST548_p3778, ST548_p5387, ST548_p7737, ST548_p5658, and ST548_p4310, and/or ENC_39630, ENC_32540, ENC_20090, ENC_44710, ENC_46830, ENC_37880, ENC_04160, ENC_26410, ENC_05800, ENC_43540, ENC_38400, and ENC_30490, wherein the presence of said at least two mutations is indicative of a resistance to one or more antimicrobial, e.g. antibiotic, drugs;
c) identifying said at least one or more antimicrobial, e.g. antibiotic, drugs; and
d) selecting one or more antimicrobial, e.g. antibiotic, drugs different from the ones identified in step c) and being suitable for the treatment of a Enterobacter infection.

3. The method of one or more of the preceding claims, wherein the Enterobacter species is Enterobacter aerogenes and at least a mutation in ST548_p8085, particularly in position 171368 with regard to reference genome NC_020181 as annotated at the NCBI, is determined, and/or
wherein the Enterobacter species is Enterobacter cloacae and at least a mutation in ENC_39630 and/or ENC_32540, particularly in position 4019444 and/or 3290230, respectively, with regard to reference genome NC_021046 as annotated at the NCBI, is determined.

4. The method of one or more of the preceding claims, wherein the method involves determining the resistance of Enterobacter to one or more antimicrobial, e.g. antibiotic, drugs.

5. The method of any one of claims 1 to 4, wherein the antimicrobial, e.g. antibiotic, drug is selected from lactam antibiotics and the presence of a mutation in the following genes is determined: ENC_39630, ENC_32540, ENC_20090, ENC_34110, ENC_19160, ENC_00130, ENC_39120, ENC_23520, ENC_34890, ENC_01640, ENC_01700, ENC_12700, ENC_07150, ENC_18520, ENC_03650, ENC_03660, ENC_09780, ENC_18300, ENC_21490, ENC_42450, ENC_45970, ENC_06960, ENC_42440, ENC_44970, ENC_15210, ENC_16040, ENC_18950, ENC_34310, ENC_04740, ENC_26480, ENC_04560, ENC_21110, ENC_17620, ENC_15900, ENC_18290, ENC_26190, ENC_28140, ENC_42910, ENC_04700, ENC_29120, ENC_08830, ENC_33440, ENC_18400, ENC_32020, ENC_42660, ENC_13620, ENC_25610, ENC_02110, ENC_02570, and/or ENC_06620, or ENC_39630, ENC_32540, ENC_20090, and/or ENC_46830; and/or
wherein the antimicrobial, e.g. antibiotic, drug is selected from quinolone antibiotics, preferably fluoroquinolone antibiotics, and the presence of a mutation in the following genes is determined: ST548_p8085, ST548_p3778, ST548_p5387, ST548_p7737, ST548_p7940, ST548_p7919, ST548_p7543, ST548_p7426, ST548_p7336, ST548_p7239, ST548_p6918, ST548_p6844, ST548_p6794, ST548_p6618, ST548_p6494, ST548_p6478, ST548_p6451, ST548_p6386, ST548_p6367, ST548_p6066, ST548_p5966, ST548_p5904, ST548_p5779, ST548_p5658, ST548_p5474, ST548_p5447, ST548_p5300, ST548_p5259, ST548_p5115, ST548_p5081, ST548_p4891, ST548_p4836, ST548_p4577, ST548_p4310, ST548_p4203, ST548_p4107, ST548_p3593, ST548_p3452, ST548_p7944, ST548_p3464, ST548_p7296, ST548_p5257, ST548_p4364, ST548_p4137, ST548_p4611, ST548_p4841, ST548_p7855, ST548_p7086, ST548_p6814, and/or ST548_p5341; and/or ENC_39630 and/or ENC_32540, or ST548_p8085, ST548_p3778, ST548_p5387, ST548_p7737, ST548_p5658, and/or ST548_p4310; and/or ENC_39630, ENC_32540, ENC_44710, ENC_37880, ENC_04160, ENC_26410, ENC_05800, ENC_43540, ENC_38400, and/or ENC_30490; and/or
wherein the antimicrobial, e.g. antibiotic, drug is selected from aminoglycoside antibiotics and the presence of a mutation in the following genes is determined: ST548_p8085, ST548_p5387, ST548_p7737, ST548_p7940, ST548_p7919, ST548_p7543, ST548_p7426, ST548_p7336, ST548_p7239, ST548_p6918, ST548_p6844, ST548_p6794, ST548_p6618, ST548_p6494, ST548_p6478, ST548_p6451, ST548_p6386, ST548_p6367, ST548_p6066, ST548_p5966, ST548_p5904, ST548_p5779, ST548_p5658, ST548_p5474, ST548_p5447, ST548_p5300, ST548_p5259, ST548_p5115, ST548_p5081, ST548_p4891, ST548_p4836, ST548_p4577, ST548_p4310, ST548_p4203, ST548_p4107, ST548_p3593, ST548_p3452, ST548_p7944, ST548_p3464, ST548_p7296, ST548_p5257, ST548_p4364, ST548_p4137, ST548_p4611, ST548_p4841, ST548_p7855, ST548_p7086, ST548_p6814, and/or ST548_p5341; and/or ENC_39630 and/or ENC_32540, or ST548_p8085, ST548_p5387, ST548_p7737, ST548_p5658, and/or ST548_p4310; and/or ENC_39630, ENC_32540, and/or ENC_44710; and/or
wherein the antimicrobial, e.g. antibiotic, drug is selected from polyketide antibiotics, preferably tetracycline antibiotics, and the presence of a mutation in the following genes is determined: ENC_39630 and/or ENC_32540; and/or
wherein the antimicrobial, e.g. antibiotic, drug is selected from benzene derived/sulfonamide antibiotics, and the presence of a mutation in the following genes is determined: ST548_p8085; and/or ENC_39630.

6. The method of one or more of the preceding claims, wherein the antimicrobial drug, e.g. antibiotic drug, is selected from the group consisting of Amoxicillin/K Clavulanate (AUG), Ampicillin (AM), Aztreonam (AZT), Cefazolin (CFZ), Cefepime (CPE), Cefotaxime (CFT), Ceftazidime (CAZ), Ceftriaxone (CAX), Cefuroxime (CRM), Cephalotin (CF), Ciprofloxacin (CP), Ertapenem (ETP), Gentamicin (GM), Imipenem (IMP), Levofloxacin (LVX), Meropenem (MER), Piperacillin/Tazobactam (P/T), Ampicillin/Sulbactam (A/S), Tetracycline (TE), Tobramycin (TO), and Trimethoprim/Sulfamethoxazole (T/S).

7. The method of any one of claims 1 to 6, wherein resistance to Enterobacter aerogenes is determined, the antibiotic drug is at least one of CP and LVX and a mutation in at least one of the following nucleotide positions is detected with regard to reference genome NC_020181: 171368, 4648161, 2963787, 578343, 2685678, 4106378; and/or
wherein resistance to Enterobacter aerogenes is determined, the antibiotic drug is TO and a mutation in at least one of the following nucleotide positions is detected with regard to reference genome NC_020181: 171368, 2963787, 578343, 2685678, 4106378; and/or
wherein resistance to Enterobacter aerogenes is determined, the antibiotic drug is T/S and a mutation in at least one of the following nucleotide positions is detected with regard to reference genome NC_020181: 171368; and/or
wherein resistance to Enterobacter cloacae is determined, the antibiotic drug is CPE and a mutation in at least one of the following nucleotide positions is detected with regard to reference genome NC_021046: 4019444, 3290230, 2054358, 4791743; and/or
wherein resistance to Enterobacter cloacae is determined, the antibiotic drug is at least one of CAZ, CFT, P/T and CAX, and a mutation in at least one of the following nucleotide positions is detected with regard to reference genome NC_021046: 4019444, 2054358, 4791743; and/or
wherein resistance to Enterobacter cloacae is determined, the antibiotic drug is at least one of CRM, ETP and AZT, and a mutation in at least one of the following nucleotide positions is detected with regard to reference genome NC_021046: 4019444; and/or
wherein resistance to Enterobacter cloacae is determined, the antibiotic drug is at least one of CP and LVX, and a mutation in at least one of the following nucleotide positions is detected with regard to reference genome NC_021046: 4019444, 3290230, 4557569, 3833518, 438917, 2674813, 611929, 4428726, 3888032, 3076462; and/or
wherein resistance to Enterobacter cloacae is determined, the antibiotic drug is GM, and a mutation in at least one of the following nucleotide positions is detected with regard to reference genome NC_021046: 4019444, 3290230; and/or
wherein resistance to Enterobacter cloacae is determined, the antibiotic drug is TO, and a mutation in at least one of the following nucleotide positions is detected with regard to reference genome NC_021046: 4019444, 4557569; and/or
wherein resistance to Enterobacter cloacae is determined, the antibiotic drug is TE, and a mutation in at least one of the following nucleotide positions is detected with regard to reference genome NC_021046: 4019444, 3290230; and/or
wherein resistance to Enterobacter cloacae is determined, the antibiotic drug is T/S, and a mutation in at least one of the following nucleotide positions is detected with regard to reference genome NC_021046: 4019444.

8. The method of any one of claims 1 to 7, wherein the resistance of a bacterial microorganism belonging to the species Enterobacter against 1, 2, 3, 4, 5, 6, 7, 8, 9, 10, 11, 12, 13, 14, 15 or 16, 17, 18, 19, 20 or 21 antibiotic drugs is determined.

9. The method of one or more of the preceding claims, wherein determining the nucleic acid sequence information or the presence of a mutation comprises determining a partial sequence or an entire sequence of the at least two genes.

10. The method of one or more of the preceding claims, wherein determining the nucleic acid sequence information or the presence of a mutation comprises determining a partial or entire sequence of the genome of the Enterobacter species, wherein said partial or entire sequence of the genome comprises at least a partial sequence of said at least two genes.

11. The method of one or more of the preceding claims, wherein determining the nucleic acid sequence information or the presence of a mutation comprises using a next generation sequencing or high throughput sequencing method, preferably wherein a partial or entire genome sequence of the bacterial organism of Enterobacter species is determined by using a next generation sequencing or high throughput sequencing method.

12. A method of determining an antimicrobial drug, e.g. antibiotic, resistance profile for bacterial microorganisms of Enterobacter species, comprising:
obtaining or providing a first data set of gene sequences of a plurality of clinical isolates of Enterobacter species;
providing a second data set of antimicrobial drug, e.g. antibiotic, resistance of the plurality of clinical isofates of Enterobacter species;
aligning the gene sequences of the first data set to at least one, preferably one, reference genome of Enterobacter, and/or assembling the gene sequence of the first data set, at least in part;
analyzing the gene sequences of the first data set for genetic variants to obtain a third data set of genetic variants;
correlating the third data set with the second data set and statistically analyzing the correlation; and
determining the genetic sites in the genome of Enterobacter associated with antimicrobial drug, e.g. antibiotic, resistance.

13. A diagnostic method of determining an infection of a patient with Enterobacter species potentially resistant to antimicrobial drug treatment, comprising the steps of:
a) obtaining or providing a sample containing or suspected of containing a bacterial microorganism belonging to the species Enterobacter from the patient;
b) determining the presence of at least one mutation in at least one gene of the bacterial microorganism belonging to the species Enterobacter as determined by the method of claim 12, wherein the presence of said at least one mutation is indicative of an infection with an antimicrobial drug resistant Enterobacter strain in said patient.

14. A method of selecting a treatment of a patient suffering from an infection with a potentially resistant Enterobacter strain, comprising the steps of:
a) obtaining or providing a sample containing or suspected of containing a bacterial microorganism belonging to the species Enterobacter from the patient;
b) determining the presence of at least one mutation in at least one gene of the bacterial microorganism belonging to the species Enterobacter as determined by the method of claim 12, wherein the presence of said at least one mutation is indicative of a resistance to one or more antimicrobial drugs;
c) identifying said at least one or more antimicrobial drugs; and
d) selecting one or more antimicrobial drugs different from the ones identified in step c) and being suitable for the treatment of a Enterobacter infection.

15. A method of acquiring an antimicrobial drug, e.g. antibiotic, resistance profile for bacterial microorganisms of Enterobacter species, comprising:
obtaining or providing a first data set of gene sequences of a clinical isolate of Enterobacter species;
providing a second data set of antimicrobial drug, e.g. antibiotic, resistance of a plurality of clinical isofates of Enterobacter species;
aligning the gene sequences of the first data set to at least one, preferably one, reference genome of Enterobacter, and/or assembling the gene sequence of the first data set, at least in part;
analyzing the gene sequences of the first data set for genetic variants to obtain a third data set of genetic variants of the first data set;
correlating the third data set with the second data set and statistically analyzing the correlation; and
determining the genetic sites in the genome of Enterobacter of the first data set associated with antimicrobial drug, e.g. antibiotic, resistance.

16. Computer program product comprising computer executable instructions which, when executed, perform a method according to any one of claims 12 to 15.

The application's sequence listing, which the Patent Office published only in electronic form, follows.

SEQUENCE LISTING (2 sequences)

SEQ ID NO: 1 - DNA, 5419609 bp, Enterobacter aerogenes (residues 1-1,806,537 of 5,419,609)
  misc_feature: EA1509E
cccggttctctccggacctaaaactgtgttaaactcttcgcgtttttctgtaagcctatgttgaggtccatctgaacgctccggcacagctctctttgccactgtatcttcctgacgacgaaacgttcgcgagtttctggccgggtgataatccttccctacttgccgctctgcagaacgtgttgcggcaggaacacagcggatacatctatatctggtctcgtgaaggcgcggggcgtagccaccttttgcatgccgcctgcgctgagctatcccagcgtggcgatgccgtcggctacgtgccgttggataagcgcacgtggttcgtgccggaagtgctggacggcatggagcaactggcgctggtgtgcatcgataacatcgagtgcgtggcaggggacgagccctgggagatggctatctttaatctctataaccgtattctcgaatcaggtaaaacccgcctgctgatcaccggcgattgcccgccgcggcagctgcatctcggcttgccggatctcgcctcgcgccttgactgggggcaaatctataagctgcagccgctgtcggatgaagataagctgcaggcgctgcagctacgcgccagactgcgcggtttcgagatgccggaagacgtctgccgattcctgctcaagcggctggatagagaaatgcgctcgctgtttatgacgctcgatcagctcgatcacgcatcgattaccgcccaacgaaaactgacgatcccattcgttaaagagatcctgaagctttaagccgaaagcgacgccagttcctgctctgccagcccggttagctgcgccaccagcgcgggggcgagaccgctacgtaacattgcggcggcgatacgctgtgcttcttctttccggccctcttgccgtccctgaagcaaaccgcgctccagcccttgctgctcgagatattctgcaatagtcatcagcgtctccttatgttgaaaaaaatcgcgccgcgggcaagaccggcggcgcgtaggggttagctgacgatttccagtacctgttccggcgggcggccgatacgcgcctggccgtggctgaccacgatgggccgttcgatgagcttcgggttctcgaccatggcctgaatcaacgcctcttcgctgagctgtgggtcggcgagattgagcgacttatacagatcttctttctggcgcatcagttcacgggcgctgctcatattcagcattttcaacagctggcgcagcgtcgcggcatccggcggcgtctccagatacagcaccacttcagggtcgatgccgttagctttcagcaggctgagcgtgtcacggctcttcgagcagcgagggttgtggtaaatttttaccgcgtcagacatgtggtctccttacattttctgataggggcggaatctttcctgcagctggcgcagctggtcgatgcgagcgtcgtagcgcgcctgctgcaaactgcccaattttacttgcgaactggcgctgctcagcagcgagatggcctggtcaagcctaccggccagcgccatgccttcggctcgcgccgccagctcctggtcgcgatgacccaatgcgccttccgcctgcgccaacaggtcccaaccgttgccgtcatctttattgttaaaggtgtagcgattgagaatggtcgcggcttccgccggctgcccgccctgtacgtaggcattggccaggttcagctgcaggaccggatcggtgcggatctctttggcgtttttcaggcggttaattgcgtcagtggtctttttctgcccaagatcgatatcggtggcgagatccagataccagggattttgtgggtcggcgctgagcagcggctggagcgctttgcgcgcctgatcgtagttattgctctccatagccagtagcgcgcggccatactgcgcggcgtgctgttcgcggatattcccttttgaccaggcgtcaagcagatcgctgccgagcttattttccccggagttgtacataccgagggtacgggccttggcgagatagaaatccgccgacgactggactaccaccgggcgcatctgattggcgcggttacgggcgtcggccagacggctttccggcagtgggtgagtgagcagcatttccggcgggcggctggaatagcgggattcgtcgagtaatttacccataaacgccggcatcgcctgcggatcgaaaccggagcgctgcagtacctgaataccgatgcggtcggcttcttcttcgttctgacgggtgaagctaatcatcccctgttgggtgccagccagggtgccggttaatgccgccatccccgcctgcgggctggccatcgccagcagaatagagcccagcgcgccaacccaggttagcggcgcgctacgtttttgatcttccatcgcacgcgccagatggcgctgggtgacgtgggagatttcgtgcgccattaccgaggcaagctggctttcgttatccgcatagcggaacagcgccgagtgcagcaccacgttgccgccgaagaaggcaaaggcgttaatctgatcgttattaatcagataaaagtggaacggcgtacggacggaattagcgtgagcgaccagacgcatgcccagcccgttaatgtattgcaccaacagcgggtcgtttatcagcggcgcgctgccgcgcagctggcgcacgtagtaatcccccatctgcatttcctgaccgatggaaagggtgcttcctgccgaggtgcccatatccggcagcgtatccgccgagtcagcggcggcaggtaatatcgtccccagcgtcaacgacgcgacggcggcggccaccagcgttttctttaactgcctgaacataacctctgtcctgtaatgtgggtgtgccagtttgaccggttatgcggcccaatgttcccatgccgcagattcagcgagtttagctgtcgttgatggcgttgaaaatatgatattcgcacagttgtgcaggtttgtgtcatagccaataaaaagcgaagtcttttttgtgacacttagatacaattcccaggattgtggcgatttgcgcttcagggaagggtttatgcttgagatgttaatgcagtggtatcgtcgtcgtttcagcgacccggaagcgatagcgctgctggttattctgctggccggcttcggcattatgttctttttcagcgggctgctggcgccgctgctggtcgccatcgtgctggcctatctgctggagtggcccaccgttcgtctggagcgtatcggcttgtcgcgaacctgggccacctcgctggtgctggtgctatttgtcggtatcttgctgttaatggcctttgtggtgatgccggtggcctggcaacagggcatttatctcatccgcgatatgcctggtatgctcaataagctttccgatttcgccgccacgctgccgcggcgctatccggcattgatggatgccggcatcattgatgcaatggccgaaaatatgcgcagccgcatgctgaccgttggcgattcggtagtgaagtattcgctcgcctcgctggtcggcctgctgacgctggcggtttatctggtcctggttccgctgatggttttcttcctgctgaaagataaacagcagatgctcaatgccgtacgccgcgtattaccgcgtaatcgcggcctggcggggcaggtgtggaaagagatgaaccagcagattaccaactatatccgcggcaaggtgctggagatgattgtcgtcggcgtcgccacctggataggcttcattctcttcggtctcaactactcgctgctgctggcggtgctggtgggattctcggtgctgattccgtatatcggcgcttttgtggtcaccattcctgtggtcggcgtggcgttgttccagttcggcgcgggtactgagttctggagcctgtttgccgtatacctgataattcaggggctggatggcaacctgctggtgccggttctcttctcggaggcggtgaatttacatccgctggtgattattctgtcggtagtgattttcggcgggctgtggggtttctggggggtattcttcgcgattccgctggcgacattaatcaaggcggtggttcacgcctggcctgatggaatggttattgaagacgagtgacgcgctgattgacgcaaaaaaacgccgggcgatttattatccccggcgttttcatttagacgttatgcgttttctttcagccagttcagcacgacatcgtggtgattgctggttttgaagttatcaaacacatgttcaatcttgccgtcagcatcaatgaggaagctaatacggtgaatgccgtcgtaggttttccccataaatgatttttcgccccagacgccgaactgttcgcagacctgatgatcttcatcagacagcagcgtaaagttcagcagctctttttcggcaaaacgagacagtttttctggtttatcagtgctgatacccagtacttcgacgcccgcttttttcaggtcgtccatattatcgcgtaaaccgcacgcttgtacggtgcagcctggggtcatggctttcgggtaaaaataaaccagaacacgctgtccctggaagtcggttaaatttacttcctcgccgtcctggtccggtaagctaaatttcggtgcgatatcaccggctttcagtggggtcattggttaaactccatcctgttcatcatgctgtgaataattaacgatgttaatactgccttgtgcgctcagttctgtacatagtgctttgaacgcttgctcgatatttgtcgtgttttgcgaggcaggactgtgtgcggtgatttgaataaatagctgagcggcgtctttatcttctcccggttgagtacgggagaccagttcggcgatattcatattccacgtgtcgcacagcgcggtaaagcgctcaatgatatgcggcgagtccggcacctctacctggatccaaaccgtattcggcatcgcctgcggtgggcgggcggaggtgcgcttcattacgatcagcaaatccagctcggctccttttaacggcagcgttgattcgatcaggttaatcgcgttccacgagccggaaagcagcattataaacgtgaactcgtcgccgagcatggccaagcggctgtcttcaatattgcagccgcagctgctgacgtggcgagtgattgtgtttacgatgccggggcggtctgcgcccagagcggtaatcaccagatagtgttgtaatgaggctgtcaaacctgttcttcctttaaaaaggtgaggtaacattaggaaagcataaaaaaaaccggcgtacaacatcccagatggcgttgggtctcttgcttttattgcagcaccaaacgtaacattgagaatcttgtcccacttctgctctgaggatggcccatgttcacgggaagtattgtagcgcttgtcacgccgatggatgataacggtaatgtctgccggtcaagcctgaaaaaactgattgattaccatgtcgccaacggaacctcggcgattgtttcggtagggactaccggcgaatccgcaacgttgagccatgaagagcatggcgacgtcgtgatgatgacccttgagctggccgatggccgcatcccggtcattgcaggtaccggtgcaaatgcaaccgcagaggcgattagcctgaccaaacgtttcaacgatagcggcgttgtcggctgcctgacggtcactccttattataaccgtccgacccaggaaggcctgttccaacactttaaagctatcgctgaacatactgacctgccgcaaattctgtataatgtgccgtcccgtaccggttgcgatatgctgccggaaaccgttggccgcctggcggaaattaaaaatattgtcggtattaaggaagcaacagggaacttaagtcgcgttcaccagatcaaagagctggtttcagatgactttattctgctgagcggcgatgacgcaaccggcatggactttatccagctcggcggcgtcggcgtcatttccgtcacggcgaacgttgctgcgcgtgaaatggcggacatgtgccgactggcgatggcgggtcaattcgcggaagctcgcgcgattaaccagcgtctgatgccgctgcatacaaaattatttgtcgaacccaacccgatcccagtcaaatgggcttgtaaggcgttgggacttgtagcgaccgacacgctgcgcctgccgatgacgccgattaccgaagcgggtacgaaagcggttaccgcagcgctgaagcatgccggtttgctgtagagtttagggagatttgatggcttactcagtacagaagtcgcgcctggcgaaggttgcgggtgtttcgctggttttactcctcgcggcctgtagttctgactcgcgctataagcgtcaggttagcggcgacgaggcttatttagatgccacgccgctcagtgaacttcacgccccggcggggatgatcctgccgctgcagactggcgactacaacattccggttgccgccagcaccggtgcggtaggcaaggcgctggatattcgtccgccagctcagcctttagccctggtcagcggcgcgcgtacccagtttaacggcgacacctccaccctgatggtggaaaacagccgcagcggttctttatgggcgcaggtggttagcatcgtacaggcgaaaaactacaccatcaccaagcgtgacgatgcaggccagacgctgaataccgattgggtagagtggaaccgccttgatgaagaccagcagtaccgtggccgttatcaaatctccgttaagccgcagggctatcagcaggcggtggtggtgaagctggtgaacctggagcaggcgggcaagcccgtgtctgacccggcttctctgcagcgctacagcacctcaatgctgaacgttatctcttccggtcttgattccaacgccactaatgcgcagaacgcggcgcagcgaagcgctggcgcgaccttcgacgtgcagagcgcggcggatgacaccggcttgccgatgctggtggtacgcgcgccgttcaacatggtgtggcagaaactgccggccgcgcttgaaaaagtgggcatgaaggtaaccgacagcactcgctctcagggcagcatggcggtaacttacaagccgctgtctgacagcagctggcaggatctgggcgccagtgacccgcagctggcctctggcgactataaactgcaggtcggcgatctcgataaccgcagtagtctgcagtttatcgacccgaaaggccacaccctgacgcagtcgcaaaatgacgccctggtagccgtattccaggccgcatttaacaagtaataaaaagggctggagcaatccggccctttttaatgtatagtgacgcaaacgtgtgcgtagccgcaaagtcaggtaatttgcctgattttgcctacgggcggaaaggtaattttttggcttaatatcactggagtggtgaaagatgaaaaagcaagctgagttgtatcgtggcaaagcgaaaacggtatacagcaccgaaaacccggatctgctggtacttgaattccgtaacgatacgtcagcaggggatggcgcccgcatcgaacagttcgatcgtaaaggtatggtgaataacaaattcaaccatttcattatgagcaagctggaagaagccggtatcccgacccaaatggaagcgctgctttctgatactgaatgcctggtgaaaaagctggatatggtgccggttgaatgcgtgattcgtaaccgcgcggcgggttcactggtgaaacgcctgggtattgaagaaggtaccgaactgactccgccgttgttcgacctgttcctgaaaaacgacgccatgcacgacccgatggtcaacgaatcctactgtgagacgttcggctgggtgaataaagaaaacctggcgcgcatgaaggagctcagctacaaagcgaacgacgtactcagcaagctgtttgatgatgccggtctgattctggtcgacttcaagctggagttcggtctgttcaaaggcgaagtggtgcttggcgatgaattctctccggacggtagccgtctgtgggataaaaacaccctcgataaaatggacaaagatcgcttccgccagagcctcggcggcctgatcgaagcttacgaagaagtggcccaccgtctgggcgtcaagctcgactaatcccctccgcgccggaagaaatcattcttctggcgctcttattcgttgtttcctgtggtaatcctccgctgaaccgcctacgatctctcatattcgtaacatgatggaatagaggtgcttatgcgctggcaagggcgtcgtgaaagcgacaatgtggaagacagacgtagtgattcaggttcgccgctgggcggcggcggtggcggtttccgtattccaagcggtaaaggcggcatcgtcctgctcattatcgttctggtggcgggttactatggcgtggatttaaccggcatgctgaccggcgaaccgatgccgcagcagcagacttcaacccagcgttcaatcagcccgaaggatgatgaagcggcgaagttcacctccgttattctggccactaccgaagatacctgggggcctatttttgaaaagatggggcggcaatacgtacagccgaagctggtgatgtatcgcggcgcgacccgtaccggctgcggcaccggtcaatcggtgatggggccgttctactgcccggcggacagcacggtctatatcgacctgtcattctatgacgagatgaaaaacaaactcggcgctgacggcgactttgcgcagggctacgtgattgcgcacgaagtcggccaccatgtgcagaagctgctcggcatcgaacctaaggtccgtcagatgcagcagcaggcttcgcagactgaagtgaaccgcctgtcggtgaaaatggagctgcaggcagactgctttgcgggcgtctggggcaataacatgcagaaacaggatgtgatggaaaccggcgatctgcaagaggcgctcaatgccgctgaggccatcggcgacgatcgtctgcaggagcagagccagggccgtgtggtgccggacagcttcacccatgggacctcccagcagcgctatacgtggttcaaacgcggtttcgatagcggcgatccttcgcagtgtaataccttcggcagcgcgcttcgctaacgtttgccgatggaaacgctgcttgacctgaccgcgcagatggcgcgtgagggtattcgtcgcctgctggtgctcagcggcgacgaacattggtgtctggcgcaggccgttgagctgcgagagcggctgggcggcgatagtctatgggtcggcgcgttggcgcggcaggaaccctacgtggcgtcgggcgcgctgaaaacgctgctcgggcgcgagttcctgcatgccttcttcgatgctcgtcacggttttgacgtggcggcttttgctgccctcggcggtacgctgcgcgccggcagttggttagtgctcctcgcgccggattttgcccgctggcctgagcaggtggatggcgattcgctgcgctggagcgatacgtctgaaccgatcgccacccctaactttgtccatcgttgtcttcaactctttagcgcggatcctgaggtcgcactgtggcgacagggcgactgcttacggttgccggaggccgcgccgcgcaggcactggcatgctgccgatggctacccgcaggccgaacaggctgccattctttcgtcactactgtcatcgcccccggaaattgccgccgtcaccgccgggcgcgggcgcggtaaatctgcgctggcgggaatgttgatccatcagctcgccggctccgccatcatcaccgcgccgacgcgcgacgcgacagcggtcatcgccgcttttgcgggggagaagatgcgctttatggcgcctgatgccttgctggcaagcgacgcgaaagccgactggctggtggtcgatgaggctgccgctatcccggcaccgacgctgcgccagctgacgacgcgttttccccatacgctgttaacgacgacggttcagggctatgagggtaccggtcgcggcttcttattgaagttctgcgccggtttcccaacgctacggcggtataacctgtcgtcgccgattcgctgggcgccgggttgcccgctggagtcggttatcgaccggttattattatttaacgatgaggcgtttctccatgtgccacatggggaaccgcagctggagacgttaagccaggatgcctggcgcgaacaacccacgcgcccatcagaggcttatcaactgctttccggcgcacattaccgcacgtcgccgctggatttgcgcaggatgatggatgcgccgggccagcactttaccgtggctcgctgcggggatagcgtcgctggcgcggtgtggctggtggaggagggggggcttgaacctgaacttagccgtgccgtctgggccggatatcgccgcccgcgcggcaatcttgtggcccagtcattggccgcgcatggcggcagcccactggcggcgacgctgaccggcaggcgcgtcagccgtattgccgtacatccagcgcgtcagcgcgaagggctggggcagcgtttaatcgcccatgccgtcaagcagacgcacggctgtgactatctctccgtcagctttggttatacccctgaactatggcgcttctggcagcgctgcggttttctgctggtgcggatggggacgcatcgcgaggcgagcagcggctgctatacggcgatggcgctttatccgctcagtgcagcggggcagcagctggcctggcgcgaacatcaacggctggcgcgggatgaacgctggctaagtcagtggcgtgatgagcgtgctccggtgacggcggaggaaacagctatgcttactgaggaggactggctggagattgccggttttgcctttgcgcatcgcccactgttgacggcggttgggagtctgaaccggcttctgcaggcgacgccgctgccgttagtggcgctccgtgcgcgattagcgcagcacgatgaggcagcgctgtgcgcggaccttggtttatccgggcgtaaggcgctgttggggcgactgcgggaagaggcggcggcggcgctgtcaggcctcgatcccgctcgtgcgcaacggctggacgagtgggtcaggaagctgcaatttttttaactaactcattcagttaaatggcatggtcatattttctgcgcggcgtaaactgccttgcatcaatcaggagccagattcctgcttatctgagacatcaggagataaccatgaaacacgatcactttattgttcagagcccggcaacacctgcgcaacagttgctgctgctgtttcatggcgttggcgataatccggtttcgatggggcaaattggtagctggtttgcgccgcaatttcccaatgcgctcattgtcagtatcggtggcgcagaaccctgcggcccggcgccggcgcggcagtggttttcggtgcaaggcgtgacggaagaaaatcgtcagcaacgcatcgatgccattatgtcgacctttattgaaacggtgcgctactggcaaaaacagagcggtttaggcccgcaggcgacggcgctgatcggtttttcgcagggggcgattatgtcgcttgagagtattaaagccgagccagggctggcgtcgcgggtgattgcctttaacggccgttacgcgacgctgccgcaaacggcgactacgcaaaccaccgtgcatctgatccacggcggcgaggatagggtgatcgatctggcgtgggcggtttccgcgcaggagaggctgcaggagctggggggagatgtcacgctggatatcgttgaagatctcggacatgccattgatgaccggagcatgcagtttgccctcgatcggctgcgttataccgtaccgaagcactattttgatgaagcgctaagcggcggtacgccgaaagatgacgatattatcgaaatgctgtgatggccccgcggtacaacgtcggctgggatgggtagcccgggtaaggcgtcagccgctacccgggaatgcatccagcctacgcgatgacggggagcgcaggtttacttcttcggctggtctttgttcggccagtcgtcatcgtcatcccacttgctattgaagtcgcgatgcggcggcagatccggtttgttatcgagatattttttcgggtcgacgcgattaagatctttaatcacattgatcatcacgccgactaaaaataccaacaccagaatccaccagtgattgataagccattccatgctgtgtcctctttttaccccgcagcggcgctgcagggtaatcgttattgtcgtcaggcgaccagttgttccatgatgcgttgatacatccgcgccagcagctgcaggtcggcggcattgacgcattcattaattttatgaatggtcgcattcaccggacccagttcaactacctgcgcgcccatgcgggcgataaagcgtccgtcagaggtaccgccggtggttagcaactgcggttttacttcattatagtgctcaatggcgttcactaccgcatcgacaagattgccgcggccggtcaggaatggctggccggaaagccaccattcgacggtatagcgcagctgatatttttccagcagcgcgatgatgcgggccttgatcatctcgtcggtcaactcggtgctgaaacggaagttgaactgaacgaacatatcgcctgggatgacattgttactgccggtgccggactgcacgttggcgatttgcatgctggtcggcgggaagtattcgttgcctttatcccattcgatagccaccagctccgccagcatcggcgccgcgcggtgtaccgggttatcggcgaggtgcggataagcgacgtggccctggactccatgaatcgtcaggttacaggtgagtgaaccgcgacggccatttttcacgacatcgccaaccacttcggtacttgaaggttcgccgaccaggcagtaatcaaggcgctcgttacgcgccatcagcgtttcgaccacttttaccgtgccatgggtggcgctggcttcttcatctgaggtgatgagaaacgccagacggcctttgtggttcggatactgcgcgacaaagcgctcggcggcgacaaccatcgccgccaacgaccctttcatatccgccgcgccgcggccaaacagcatgccatcacgaatagttggttcaaacggcggattgatccagcggtcggcgtcgccggccggtaccacatcggtatggccggcaaaggccagcgtttcaccctgtccacgccaggcccagaaattttgcgtatcgccgaagtccatcgcttcaacggtaaagccgatcgcccgcaggcgttcaatcattaacgcctggcatcccgcatcattggggctaagggaagggcggcgaataagctgctgagccagctcaatgaccgggcaagacatagactacacctcgttaataaatttttcgtagtttgcttcgctaaagcccagcagcataggctgaccgggcgcgcagagcaatgggcgtttgataattgccggcatttccagcatcaacgccgccgccgcatcggcattatcgataccggcgcggaccgattcatcgagtttgcgccaggtagtgccgcgggtgttaagcagcgcttcccagcctaattcggcaataaaggtattcagcaattcgcggtccagtccgtcaacgcgatagtcgtggaagcgatagtcaatctgatgggcttccagccagcggcgggcctttttaatggtgtcgcagtttttgatgccgtacatggtcaacataattaaaccttcacgttaaaagaatatgtttctcagtcttttccgaatatataagttttgttaaataatacgtgaattggctggataaatataacttttcagtcttgtctgattaaaatttgttctttttcacggcagactaagataatgaattacaggaattctgatattaacaaaatgttgcgtaatgttgctctatgtcacattaaatttacatgaaccggcttatggtagcggcaagccagagtattcaaggtttgcggcgacaataaaagcgattagagcgatagatcggacgaacttctcctgagcggggaaattacctaaaatcgccataataataagagaggctattatgattgaacatgaactggggaactggaaagattttatcgaagacatgctgcgtaaataaaatctggctttgtcggtactgaagacaatgttttacccatgaaaaaggcgactatgacagtcgccttttctgttatttgaaggtttattccggcctctctttcagcgggaagcggcggcgcaccaacacgaagaacagcggcacaaagaagatggccagcacggtggcggagatcatcccgcccatgacgccggtaccgaccgcgtgctggctgccggaacccgcgccggtactggtggccatcggcagcacgccgaagataaacgccagtgaggtcatcagtatcgggcgtagacgctggcggcaggccgatagcgtggcggtcagcagatcttcgcctttctggttcagttcgttggcgaactcaacaatcaggatggcgttctttgccgacaagccgatgaccgtcagcaggccaacctggaagtagacatcgttttccagaccgcgcatccaggtcgccatcagcgcgccgataactcccagcggcaccaccagcatcaccgagaacggtaccgaccagctttcatatagcgccgccagacacaggaacaccaccagcagcgaaatggcgtacagagcaggcgcctgagcgccagacaggcgctcctgataggacatcgccgtccattccaggccgaaaccgttcggtagctgtttggctaactcttccatgatggtcatggcggtaccggtactgacgcctggcgcggcctcaccgacgatctcgaccgctgagtagccattgtaacgttcgaggcgcggtgaccccgtttcccaacgcgaggtggcgaaggcggagaacggtaccatggtgccgctactgttacgcacataccacaaattgatatcgtcaggcagcatgcgatatttcgccgctgcctggacgtagaccttcttcacgcgtccgcgatccataaagtcgtttacgtagctcgaaccccaggcggtctgcagcgtatcgttaatatcatcaatagagacccccagcgcctgggctttacgctggtcgatatcaacctgtagctgcgggctgtcgtccagaccgttgtggcgaacgcgggtgagctggtcgttgttcgccgccagctccagcagcttgtcgcgtgctgacatcaacgcctcgtgaccgttaccggcgtggtcttcgagctccatatcgaagcccgcggagctgccaaggccgctgatggccggtgggctgctggcaaaaacgcgcgcttctttaattttattgaaggctttggtcgcgcgctcaatgatagcgaacgaggaaccggttgtcgggtctcgctggtcccagtctttcaggcggacaaacatacgagcgacgttctggccgttgccgccggggccggagccgacggtagcaaataccgactcgacgttactcttctcgttattaaggaaataatcctccgctttctgcaccactttcagcgtctgctgttgggtggaaccgctcggaagctgtatcgaggtggtgaacataccgcggtcttccagcggcaggaacgaagtcggcagatgcaggaacagcagcaccatgccgccgagcagcaggacgtaaatcaaaatccagcgcagcgagcggtggagaattttgcctacgaaagtttcatagcggctggcgctgcggttgaaggcgcggttaaaccagccaaagaaccctttttgaccatgtacttcgcctttgtgaatcggttttaacagcgtggcgcacagcgccggggtgaggatcatcgctaccagcaccgacagcaccattgctgaaacgatggtaatggagaactggcggtaaatggcgccggtggtgccgccgaagaaggccatgggcacgaataccgccgatagcaccatagcgataccgaccagcgccccctggatctgcttcatcgattttcgcgtcgcttcgcgcggcgagagcccttcctcgctcataatgcgctcgacgttttcgaccacgacaatggcgtcatcgaccagcaggccgatagccagcaccgtcgcgaacatcgtcagggtgttaatactgtaaccgcaggcgtaaagcaccgcgaaggtgcccatcaataccaccggcacggcgatggtcgggatcagagtcgcgcggaagttctgcaagaacaaatacatgaccaggaacaccagcagaatcgcctccagcagcgttttcaccacatcggtaatcgaggcttttacaaaagaggtggtctcgtaggcgactttatactgcagcccgtgcggaaaatattgcgacagttcatcaagacgggcgataacgcgctcggcggtggccatttcgttggcgccggaggcgagcttaattcccagtcccgaagcggcctgacgattatagcggctcagataatcatatttttcagcgcccatttcgacgctggcgacatcgcccagcgtgacttccgaaccatcctgattcacgcgcagggtaatatcgcggaactgctgtggcgtttgtagcagcgattgtgagttgatggtggcgttcagcgcctgtttatccaccgacggggtaccgcccaactggccgacggcaatctgcgcgttctgcgattcgatggcgtcagtcacatctttcgccgtcatctgatagctgttgagtttcgccggatcgagccagatgcgcatcgagtactgcgaaccgtaggcgtcgatatcgccgacgccgttgacgcggcttagaggatcctgcacgttactggcgacgtagtcagcaatatcctgcttatccatgctgccgtcggtagagacaaacgcgagagtgagaatgttggtgtcgccggttttgcgcaccgtgaccccctgattttgtaccgcctgcggcagtttacgcatcgccgattgcagctggttttgtacctgctgcacggcctcatccgggtcggtaccggcggtaaagctcagggtaaccgttgcctgaccggtggcgctactctgcgatgacatgtacatgaggttatcaaggccggtcatattctgttcgataacctgggtcacggtattctccagcgtctgcgcggaggcgccgggataattggccgtcacccggacgttaggcggcgccaaatccggatattgttctacggggagcgacaaaattgccaacgtgccggtcaggaccaacagaatagccaaaacccaggcaaagatggggcgatcgataaagaaattcgccatcggaatcaggacctcattgtatacattttttgttattgcgcagcttgtgacactttatagttaaccccgcaggcaatcgtggagaaattaaggagatagtgtaatttatcatgtgtcttttatgagagcgtaaagaaacctctgccgctcctctctgaatttatatgcgcttatcacgtcttttctgtcattccgtcaaagccgcctattattgctcagctaaatgaaacaaaatttcattcaggtcaatatttttgatctaaaccggattctggcgagaaaagccgatttctgggcaaatgaccattgtcccacggtcatgatgtcaggtaataaacagtcatactaaatgaggggttattagcgataagccggaaggatgtatgaaccactttattatgagcgatagtcgcaaatgcatcggatgcaggggctgcgaagtggcctgcgtgatggcgcataatggcgaacaacatgtcttgaccccacagcgctttttgccgcgtattaccgttattaaaaaccagaaacagcgtaacgcggtaacctgtcgtcactgtgaaggcgcgccctgcgtgcgtagttgccctaatggcgccattagccagcaggatgacagcgtattggtgcatggagaaaaatgtattggctgtaaatcctgcgtggtggcttgcccctttggcgtgatgcaaatcgtcgtcacgccagacggcagggcaacggcgcacaagtgcgacttatgctatgagcgccaagccgggccggcctgcgtgcagaattgtccggcgcaggcattacagctggcgaccgattccacgctaagcgagatggcgaaaacgcggcgcctgcgggcagcgcgtgcggatgcggcgtcgtggcaacatcgtactttgaccgctttagcgtcaacctctggcgataaggccagtcagatggcggccacgcccgcgcgcggcgaggcggataaactggcggctgatgcgcgtaaacagcactttggcgaaatctatttgcccttcagcgccgaacaggcgcggcgggaaacgcaacgctgtctgaaatgcggcgatcgcagcatctgcgagtggacctgtccgctgcataaccatattccgcagtggatcgagcgggtaaaagccggcgacatcgccagcgccgttgagctttcccatcaaaccaactgtctgccggaaatcaccggccgcgtctgcccgcaggatcgcctgtgcgaaggcgcctgcacgctgcgcgacgagagcggctcggtgactatcggcaacatcgaacgctatatctccgaccaggcgctggccgacggctggcgcccgaacctttcggcggtaaaagccagcggcaagaaggttgccatcatcggcggcgggcctgcgggcctggcctgcgccgaccttctggcgcgtagcggcgtggcgccggtggtgttcgatcgccacccggaaatcggcggcttgctgactttcggtattccgcctttcaagctggataaatcattgctggcccgtcggcgcgagattttcagccaaatgggcatccgctttgaactgaactgcgaggtgggcaaagacatcgaactcgctcaactgcttgcagactatgacgcggttttcgtcggcgccggtacctatcgctcgatgaaagccgatctgcccaatgaggaggcgccgggcgtgtatgaagcgctgccgttccttatcgccaacactaaacaagtgatggggctggaagcgctggccgatgaaccttatatcgataccgctgggctgaatgttgtcgtgctggggggcggcgatacggcgatggactgcgtgcgtaccgcgctgcgccacggcgcgcaacgggtcacctgcgcctatcgtcgggatgaagctaacatgccggggtcgaaaaaagaggtcaaaaacgcccgcgaagagggggcgaactttgaattcaatgttcagccgatcacccttgagctcggcgagggcggccgggtcagcggcgtgcgttttctgcgtacccggcttggcgaaccggacgctcagggccgccgcagcccgtcgccgatccccggcagcgaatttgtgatgcctgccgatgcggtcattatggcgtttggtttccacccgcattcgatgccgtggctggaagccgcaggggtacagctggacagtcgcgggcggatcaaggcgaacgtggagagccgctatcgttaccagaccagtaatcagaagatctttgccggcggcgacgcggtacgcggcgcggatttggtggtgacggcgatggcggaagggcggcatgccgcgcaggggatcatggactatcttggtgtcgcttccgcactgccgcactaacgacaaagcaggctccgcggcgtagtatgactgggttatttcacgctgcggagtttgcatgtcacttaatattcacgtcattaaagataaaatcctttccgaaaactactttctgctgcgcaacatgacctatgagttgacgcgccgcgacggcagcgtcgtgcgtcacaaacgcgaagtgtacgatcgcggcaacggcgccacggttttgctttacaaccccaacaagcagagcgtggtactggtgcgtcagttccgcgtcgccacctgggttaacggcaaccctgatggcatgctgattgaaacctgcgccggactgctggataacgacgcgccagaggtatgcatccgcaaggaggcgattgaggagaccggctatcaggtcggcgaggcgcgcaaggtcttcgaactctatatgtcgcccggcggcgtgaccgaactgattcacttttttatcgccgaatacagcgaagcgcagcgcgctaaccggggcggcggcgtggatgatgaagatattgaggtgctggaactgccgttcgtccgggcgctggagatggtcgccagcggtgaaattcaggatggcaaagcggtgatcctgctgcaatacctacaaaattccggcctgatgtcgcgggatctctgataaatctgattgagcaaaaccccgccagtgctgatgataatgatgaattagaaatcactctgtcagtcatacttcgggattgtgccgctcatgtttcatcgggttttaatgctgctttttttcggttttctgccgacgtcgttggcgtgggcggcgccagcccagcagttgtttggagactggcttgtcacctgcaacaatcaaaattattgcgtcacgcgtaatgtcgggctgcatcatggattggtgatgacgttaagccgcagcgcgggggcggccaccgatgccgctttacgcatcgaacttggcggcgttggtaatccggtcgccgcgctggcggccatcggcccgcggctgcagctagatggaaaaccgctgcattttgacggtaaacattggcagattgccgataagctgattaaaaccggtgatagcgtcagtatcgacgctttcctgcagcaggcccaggaggggaaagagattaccctgcaaaacggtctgcaaagcatttcattgaagggcctgaaggccgcgctgctatttattgataatcggcaaaagcgggtcggcagcgaaaccgcgtgggtcggcaaaggtgaagaaccaccgctcagcgtaccgccagcgccggcgttgcgcaccgtaggcaaagcggaggtggcgcagtcgcccctcagccgcgacgaactaaatgagcttatcgattacggcaatgagcggatgaacgccagcccctgttcgctcgatcctttccgccgggaaatccgcgtcaccgcgctgaccgatgagaaagttctgctgatgaccagttgcgaagcgggcgcctacaataccgtttggctggcgtggctggtgtcgcgcaaaacgccgcatcttgcccgccaggtgcgcctggcgctgcctttccagccgcccggcaatgcgccgcgtgatattgagttgattaacgccagctttgacgagcagcgtcatgaactggtgaccttcgataaaggccgcgcgccgggcgattgcgggatccaaacccgctggcgttatgacggccagcggttcaatttgacccgctacgctcagcaaccgcagtgcgataactggcaggggccagacgcctggcccacactatggatcacccgttaagcaccttacggctgacttcgacaatatgttcagcggtaaagccgaagaacgggaacagcttgtcggcgggcgccgattccccgtagcgggtcataccaacaattgcgcctttcaggccgacatatttataccagtagtcggcgataccggcttcgatagcgacgcgggcgctaacatcggaaggcagcaccgactcgcgccaggcctcatcctgagcatcgaaaacgtcggtggaaggcagcgacaccacccgcacgtttatgccgctggccagcagcgtctccgccgcctgaacggcgatctcgacttccgaaccggtggcgatcaggatgagatccggcttgccgcccgcatccttcagaacgtaaccgccgcgagcaatttcctgcacctgttccggcgtacgggccatttgcgccagattctgtcgcgaaaggattaatgcggtagggccgtccttgcgctcaatggccgcctgccaggcgacggcggtttccacctgatcgcacggacgccaggtactaaaattgggcgtcagccgcaggcttgccagctgctctaccgcctggtgcgttgggccatcttcgccaaggccgattgaatcatgggtatagaccataatctgatgcgccttcatcagcgccgccatgcgtgcggcgttacgcgcgtattcgacgaacatcaggaaagtcgaggtatagggaataaaaccgccgtgcagggcgatgccgttagccaccgcggtcataccgaattcgcgtacgccgtagtggatataattacccgcctgatcctctttgatcgacttcgagccggaccagatcgtcaggttactgggcgccaggtcggcggaaccaccgagcagctcaggcaaatccgggccgtaggcgttaagcgcattttgtgaagccttacggctggcgatcttcgccggttccgactgtagcttcgctacataatcgcgggccgttttttgccagttatccgggagctcgccttccatgcgccgtttaagctcagccgccagttctggatactgctgctgataagcggcgaatttttcattccacgcatgttctgctttctcgccgcgcggccgcgcatcccagccctgataaatttctttcgggatttcaaacggcggatatttccagcccagctgttcgcgggccagcgcgacctctttttcccccaatgccgcgccgtgcgactcttcggaaccggctttatttggtgaaccaaagccgattatggtgcggcaaataatcagcgagggtttgtctgttaccgcctgcgcctcctggattgcctgcttcaccgcctgggggtcgtgaccgtcgatatcgccaatcacgtgccagtggtaggcgcgaaagcgctcggcggtatcgtcggtgaaccagccttcaacgtggccgtcaatagagataccgttgtgatcgtagaacccgatcagcttgcctaatcccagggtgcccgccagcgaactggcctcgtgagaaatcccctccatcagacagccatcgcccataaacacccaggtgtagtgatcgacgatgtcgtggccgggacggttaaactgcgccgccagcgtacgttcggcgatagccatcccgacggcgttagccagcccctggccgagcggcccggtggtggtttccacgccgggggtataaccatgttccgggtgacccggcgttttcgaatgcagctggcggaagtttttcagctcattcatcggcagatcgtagccggtcaaatgcagtaggctatacagcagcatcgaagcatggccgttagacaaaatgaaacgatcgcgatcgtaccagtgcggatttgtcgggttgtgcttgagaaaatcgttccacagcacttcggcgatatccgccatccccatcggagcgccggggtggccggaattggctttctggacggcgtccatgctcagggcgcgaatggcgttagcaagctctcttcgggacatagtcgtttactccgtgacaaaggatgacagttttgctgctagcagatcttccagtttgcgttgatcgacggcgaactggcgaataccttccgccagtttttctaccgccatcggatcctggttatgctcccagcggaattccgcttcgctcatcggaaccgggcgtggcagtatctgatgagcggggatgagtttgcgtattaccggcgcgtcgctggcctgcagctcttgtaacaaggctggggagatggtgaggcggtcgcagccgaccagagcgaggatttgttcggtgcggcggaagctggcgcccatcacgatggtgttgtacttatggagtttgaaatagtcgtagatattgcgcaccgatttcacccccgggtcttcatcaaccacgtaaggatctaacggctgacgcgcctgataccaatcgtaaatacgcccgacgaagggcgaaatcagaaacacgccggcttcagcgcaggcgcgagcctgggcgaaagagaacagcagcgtcaggttgcagtgaatcccttctttttccagcacctccgcggcgcggatcccttcccaggtggaggctagtttgatcaggatccgcgacttatcgatccccatttcctgatagagagcgaccagatggcgcgctttctcgatacttttttcacgattgaaggagagacgggcatcgacttctgtggagacgcgccctgggatgcttttgagtatttccgcaccaaaattgaccgccagtttatcgcaggcattggcgacctgcgtctcgcggttgccgccctgttttgcagcccaggcgagggcatcatcgataagcccggcgtagttatccagtccggcagcctttaagagcagcgaagggttggtggtggcatcttcaggctgatagtggcggatagattcaatgtcgccgctgtcggcgactacggtggtgaattgtttgatactgtctagctggttcattaaaaagtactcctggaacaataagttgcatgagttcttgtcgttatgcggtagaggtcgtgatgaggtacataactaaaaagcatagcagacggggctatcattgaccgtgaaactaggttacataaatattataaattgataacaaccagacctttgtgatggcaagagtatggcggccttcaaagtttaaaccgccgtcaggcgcgatactaagcctcgccttaaggcgggccgacggctcgccatcacgcttcaccccctacgattcgatacgtgaaaggaaccataaaatggatgagcagttgaaacaaagcgccctcgatttccacgagttcccggtgcccgggaaaattcaggtgtcgccgactaaacccctggcgacccaacgcgatctggcgctggcatattcgccgggcgttgccgcgccgtgcctggaaattgagaaggatcctttggccgcttacaaatacaccgctcgcggcaacctcgtggcggtggtctccaacggtaccgccgtcctcggtttaggcaatatcggcgcgctggccggaaaaccggtaatggaaggaaagggcgttctgtttaaaaagttcgccggtatcgatgtgttcgatattgaagttgatgagctggatcctgacaaattcattaatgtcgttgccgccctggagccgacgtttggcggcatcaacctcgaagatattaaagcgccggaatgtttctacattgagcagaaactgcgtgagcgcatgaatattccggtgttccacgacgatcagcacggcacggcgattatcagcactgcggcgattctcaacggtctgcgggtggttgagaagaatctctctgatgtgcggatggtggtctccggcgcgggagcggcggctatcgcctgtatgaacctgctggtggcgctgggaatgcagaaacacaatatcgtggtctgcgactcgaaaggcgttatctataaagaccgtgaagccaacatggcggaaaccaaagcggcctacgcggtggaagacgacgggaaacgtaccctcgacgatgtcatcgatggcgcggacattttccttggctgctccgggccgaaagttctgaccccggagatggtcaagaaaatggcgcgctcgccgctgatcctcgctctggcgaacccggagccggaaatcctgccgccgctggcgaaggaagtgcgcgacgacgtgattatttgtaccggccgttccgactatccaaaccaggtcaacaacgtgctgtgcttcccgttcatcttccgcggcgcgctggatgttggcgcgacggcgataaacgaagagatgaagctggcggcggttcatgctatcgccgagctggcgcatgccgaacagagcgaagtcgtggcttccgcctatggcgaccaggatctcagctttggcccggagtacattattccgaaaccgttcgatccgcgcctgatcgtcaagattgcgccagcggtcgctaaagcggcgatggaatcaggcgtggcgacccggccgattgccgacttcgatgcctacatcgagaaactgagcgagtttgtctataaaactaacctgtttatgaagccgatcttctcccaggcgcgcaaagagccgaagcgcgtggtgctggcggaaggtgaggagactcgcgtgctgcacgccacgcaggagctggtttctctggggctggcgaagccaatcctcatcggtcgtccgagcgtgattgaaatgcgtatccagaaactgggtctgcagatcaaaccgggcgtggactttgaaatcgtcaataatgaatccgatccgcgctttaaagagtactggagcgagtactatcagctgatgaagcgccgcggcattacccaggagcaggcgcagcgggcggtcattagcaacacttcggtcattggcgcgatcatggttcatcgcggtgaggcggatgcgatgatctgcggaaccatcggcgattatcatgagcactatcgcgtggttcagccgctgtttggcttccgcgacggcgtcagcaccgccggggcgatgaacgcgctgctgctgcctagcggcaacacctttatcgccgacacctacgtcaatcacgatccatcgccggaagagctggcggagatcaccctgatggcggcggaaagcgtgcgtcgttttggtatcgaaccgcgcgtggcgctgctgtcgcactctaacttcggttcagctgattgcccgtccgccagcaaaatgcgcaaaacgctggaattggtgaaagcgagcgcgccggatctgatgattgacggcgaaatgcacggcgacgccgcgctggtggagagcatccgcaacgatcgtatgccggatagcccgctgaaaggggcggctaatattctggtgatgccgaatatggaagccgcgcgtatcagctacaacctgctgcgcgtctccagttcggaaggggtaaccgtcgggccggtactgatgggtatcgctaagccggtgcatattctgacgcctatcgcctccgtgcgccgtatcgtcaacatggtggcgctggcggtcgtggaagcgcagacccagccgctgtaagcacaataaaaaagtaagccccggtaatccggggcttttttgtctcaggagacctaaatcagatccactctttcactttgatgaactcgctcagcgcggcttccgggctgccttcctgcggatggtagtcatactcccagcgcaccagcggcggcatcgacatcagaatagactccgtacgaccgccggtctgcaggccgaacagcgtgccgcgatcccacaccagattgaattccacataacgcccgcggcgataaagctggaaatcgcgttcgcgctcaccgtaaggcgtggtttttcgacgctcaacgatcggcaggtaagcgtcggtaaagccgttgcccactgcctgcataaaggcgaagcagtggtcgaagtccggggtatttaaatcatcaaagaacagaccgccaatgccgcgctgttcgttgcggtgcttaaggaagaagtaatcatcgcaccactttttgtagcgcggatagacctcgtcgccgtacggcaggcataaatcgcgggcagtacgatgccagtgaatggcgtcttcttcaaacccataataaggcgttagatcaaacccgccgccgaaccaccacaccgggtcggcgccgggcttctcggcaataaaaaagcgaacgttagcgtggctggtcggcacataggggttgcgcggatgcaccaccagcgaaacccccattgcttcaaagctgcgcccggccagttccgggcggtgggcggtagccgaggcgggcatcgcatcgccgtggacgtgagaaaagttaaccccggcctgctcaaagatgccgccgtcgcgtaaaacccggctgcgtccgccgccgccgccttcgcgctgccagctatcttcaacaaaatccttgccgtcaacggcggagagtttggcgcaaatggcatcctgcagctgaagaaggaaggctttgacctgctgtacatcgggtttcattaacgtctcttcgaatgcgctttctggttatcgaaccagtggaaataactaataatgccggaagcgatagcgttagcaatcttctggcggaaagcggttgtgccgagtagcttctcttcatttgggttggtaatgaacgacgtttcgaccagcaccgagggaatcgaaggggacttcagcaccacaaaggccgcctgctctgtattgcggctgtgcagtttatgcaccggcttaatctttttcagaatatgcgagccgagcgtcaggctgttcttaatggtgtcggtttgcaccaaatcgaacaatacctgctgcagcagatggtccttatccgtcgcttttttaccggcgacctcatcggcgcggttttcgcgctcggagagatatttcgccatggcgctactggcgccgcggttggagagcgcaaagacggaggcgccggccgcactcgggttggtaaagccgtcggcgtgaatcgacataaacagatcggcgccgtgctggtgggcgatctcaacgcgatcgtacagcggaataaaggtatcgccgctacgcgtcagacgggcatcgatgccgttgctgcgtaaaatgctgcgcacatttttagcaatggccagcacgacgtgtttttctttcgaaccgttgtggccaattgcccccgtatcgatgccgccatgaccggggtcaagcatcaccagacgcctgctgcctgctttctttgcgacgggtttgctgtgtccattggaagtttttagcggctgctctttggcagtggcttgggaagcgacgccggttagcgtcatcgcagccagtcctgctttcagcacctgacggcgcgaagcaagtatttttaatggtttaaaagtgctcattcggcctgaattgtaaacaagtgatgtccaatgttatatcgtatcgcgtttcccgttacgaccactcaaaataagaattgttttacttttcatttcaatacatgacaaagcgatattatgccattttttgctgatgatttcgcctgatattggctatcagtcatattcgcgccataatcactgtttttaaccgtaaatggtggggaataccatggagattcgcgtttttcgccagcaggatttcgaagaagtgatcaccctttgggagcgctgcgatcttctgcgcccatggaacgatccggaaatggatatcgagcgtaagctcaaccacgacgtgagcttgtttctggtcgctgaagtgaacggtgaagtggtggggacggtgatgggcggttacgacggccaccgcggctccgcttactatcttggcgtacatccggaataccgcggccgcggtatcgctaatgcgctgctcaatcggctggaaaagaagctgatcgcccgcggttgcccgaaaatttcaattatggtgcgtgacgataacgatgtggtgcaggggatgtacgagcgtctcggttacgagcactcggatgtactcaccctgggtaaacgcctgattgaagatgaagaatactgaatttattcctgccgattatgatacccagggtcgtttacggctgccgctgttgttttggggtgtgctgttgctgcaggcgcgcacctgggtgctgttcgtcatggccggcgcctcccgccagcagggggatgcgctgctgagcctgttctatcccgatcacgataacttctggctgggtttgctgcccggcgtaccggcggtcgcggcatttctgcttagcggtcagcgtcagcgtttcccgcgtctctggccgctgatgcgctggctgctaattgcttcacaggcgctattgctggcctggcagccgtggctgtggttcaccggcgaggcgccttccatgctgaccatcgccctgctggcggccgatatttatgcgctatggtggctgataaccagccgcaggttgcacgcctgttttcgccttgaagcgctttaatggcactttttgccgatcgcgcactccaacatgcgttgaatgaatcagaaaggattgagttatgaaatcgctacgtctaatgctttgcgcgcttccgctggcgctaaccggctgctcaacgatgagcgcggtgaactggtcggctgcctatccatggaactggtttggttcctccaacgaggtcaccgagcagggcgtgggtaaactgacggcgtcgacgccgctcaatgaacaggcaattagcgatgccctcggcggcagctaccgtctgcgcagcggaatgaaaaccgcggatggcaaaatcgttcactattttgaagcgctaaaggatgacaagctggcgctgactatcaacggcgatggcggtacggtgagccgcattgatgtgcgcgatagcgcgattcccgccgccagcggcgtgaaaatcggcaccccgtttagcgagctgtacagcaaagcgttcggcaactgcgagaaaggcgcctctgataacggtgcggtggtggaatgtaaagctgcaggtagccagcacatcagctacgcctttaccggccactggagcggcccggacgagctgatgccgtccgacgataccctgaagaactggaaagtcagcaaaattatctggcgtcgctaatttgatctgaagagacacgtgggcggataaaaacggttacaatggcgcgttagcaacgtcatagcgttgtggttgcatcatttcaggaggagcgatgtctcaggttcagagcggcattttgccggaacattgccgcgcggcgatttggattgaagccaatgtaaaaggggacgttaacgccctgcgcgaagcgagcaaaatttttgtcgataatgtggccaccttccaggctaaattccctgacgccaaactcggcgcggtggtcgctttcggcaataccgtctggcgtcagctgagcggtggtgaaggcgcggaagagttaaaagattttccggtttacggcaaagggctggcgccatccacgcagtatgacgtgttgattcatattttatccgcccgtcatgaagtgaacttttccgtcgcccaggcggcggtggccgctttcggcgacgccattgaagtgaaagaagaaattcacggtttccgctgggtggaagaacgcgatctgagcggcttcgtcgacggcaccgaaaacccggcaggcgaagaaacccgccgtgaagtcgcggtgattaaagacggcgttgacgcgggcggcagctacgtattcgtgcaacgctgggagcacaatcttaagcagcttaaccgcatgagcgtgccggatcaggagatgatgattggccgtaccaaagacgccaacgaagagatcgacggcgacgagcgcccgattacttcgcacctgagccgcgtggacttaaaagaagatggcaaagggctgaaaatcgtccgccagagcctgccatacggtaccgccagcggcactaacggcctgtacttctgcgcctactgcgctcgcctgtataacattgagcagcagctgctgagtatgttcggcgataccgacggtaagcgcgatgccatgctgcgcttcactaaaccggtgaccggcggttattacttcgcgccgtcgctggagcgtattcaggcgctgtaatttttcccctcaccctaaccctaacccagagggttagggttagggtgtaagcgaatccagcatacgtacagccgctttcagcaaagctttgccagttgcttattctcttttctacttccaaatcgccaaacggtatataaaaccgttactcctttcgtactcgttataaatatgatgatcatcagtaaatgatcatttttgataagggtgcgcaatggccgttaaatcactgaaaaaaggatatctggcgctggcagcttccatgctgctggtggcgcaggcgcaggcgactgaactgctgaacagttcctatgatgtttcccgcgagctgttcgccgcccttaatccgccttttgaacagcagtgggcaaaagaaaacggcggcgacaagctgaccattaagcagtcacatgcgggctcctccaagcaggcgttggcgattctgcaaggtctgaaggctgacgtcgtgacctataaccaggtgacggacgtccagattctgcatgataaaggcaacctgatcccggcagactggcagagccgtctgccgaataacagctcgccgttctattcgaccatggcgttcctggtgcgtaagggcaatcccaaaaatattcacgactggaacgatctggtgcgttctgacgtgaagctgatcttcccgaatcctaaaacttcaggcaacgcgcgctatacctatcttgcggcctggggggcggcggacaaagccgatggcggcgataaagccaaaaccgaacagttcatgacccagttcctgaagaacgtcgaggtattcgataccggcggtcgcggcgcgaccaccaccttcgtcgagcgcgggttgggcgatgtgctgattacttttgaatcggaagttaacaacatccgtaaacagtatgaagcgcaggggttcgaagtcgttgtgccgaaggtcaatatcctcgccgaattcccggtcgcgtgggtagacaaaaacgttaaggccaacggtactgaaaaagcggcgaaagcctacctgaactatctctatagtccgcaggcgcagaccatcatcaccgattactactatcgcgtgaacgatccgaaagtgatggcgtcgctgaaagataaattcccgcagaccgaactgttccgcgtggaagaccagtttggcagctggcctgaagtgatgaaaacccacttcgtcagcggcggcgagctggacaaactgctggcagcggggcgtcagtaatgttggctgtgtcgtccaagcgcgtgctgccgggctttaccctgagccttggcaccagcctgctgtttgtgtgcctgattttactgttgccgctcagcgcgctggtaatgcagctggcgcagatgagctgggcgcagtattgggaggtgattaccaacccgcaggtggtcgccgcctataaagtcacgctgctgtctgcttttgtggcctcgatttttaacggcgtgtttggcctgctgatggcgtggatccttacccgttatcgttttccaggccgtacgctgctcgatgccctaatggacctgccgttcgcgctgccgacggcggtggcgggcctgacgctggcctcgctgttctcggttaatggcttgtacggcgagtggctggcgaagtttgatatcaaagtgacctatacctggcttggcatcgcggtggcgatggcctttaccagcatcccgtttgtggtgcgtaccgtgcagccggtgctggaagagttagggccggaatatgaagaggcggcggaaaccctcggcgcgacgcgcttacagagtttccgcaaagttgtgctgcctgaactgtcgccagccctgctggcggggattgcgctgtcgtttacccgcagccttggcgagttcggtgcggtgatctttatcgccggcaacatcgcatggaaaacggaagtgacttcgctgatgattttcattcgtttgcaggagtttgattacccggcggcgagcgcgattgcctcggtgatcctcgcggcttcgctgctgctgctgttctctatcaacaccctgcagagtcgctttggtcgacgcgtggtaggtcactaatggcggaagttactcaattgaagcgctatgacgcgccccggatcaactggggcaaatggtttctgatcggcgtcgggatgctggtatccgccttcatcctcgtggtgccgatgatttatatttttgtccaggctttcagtaaagggttaatgccggtgctggaaaacctggccaatccggacatgctgcacgccatctggctgacggtgatgatcgcgttgattaccgtgccggtgaatctggtattcggtacgctgttggcctggctggtgacgcgctttaccttccctggccgccagctgctgctgacgatgctggatatcccgttcgccgtctcgccggtggtggcaggtctggtttatttactgttttacggctccaacggcccactcggcggctggcttgatgagcacaacctgcagatcatgttcgcctggccgggcatggtgctggcgactatcttcgtcacctgtccgtttgtggtccgcgagctggtaccggtgatgatgagccaggggagcaacgaagatgaagcggcgatcctgctcggcgcttccggttggcagatgttccgccgggtgacgctacccaatattcgctgggcgctgctgtacggcgtggtgctgaccaacgcccgcgcgattggcgaatttggcgcggtgtcggtcgtttccggctcgatccgcggcgaaacgctgtcgctgccgctgcaaattgaattactgcagcaggactacaacaccgtcggttcgtttaccgccgcggccctgctgacgttaatggctattttgaccctgtttttaaagagtatgttgcaatggcgtctggccaatcaggaaaaacgcgcgcaacaggagggaaatcatgagcattgagattgccaatattaagaaatcgtttggtcgcacccaggtgctgaatgatatctcgctggatatcccttccgggcaaatggttgcgctgttggggccgtccggctccggtaaaaccaccttattgcggattatcgccgggctggagcatcaatccagcggccatatccgttttcacggtaccgacgtgagccgaatgcacgcccgcgatcgtaaagtgggctttgttttccagcactatgcgctgtttagacatatgacggtattcgataacatcgcctttggcctgaccgtgctgccgcgccgtgagcgtcccaatgcggcggcgattaaagccaaagtgaccaaactgctggagatggtgcaactggcccatcttgccgaccgttatccggcgcagctttccggcggccagaagcagcgcgtggcgttagcgcgcgcgctggcggttgagccgcaaattctgctgctggatgaaccctttggcgcgctggatgcgcaggtgcgtaaagaactgcgccgctggctgcgccagctgcatgaagaattaaaattcaccagcgtgtttgttacccacgaccaggaagaggcgatggaagtcgccgatcgggtagtggtaatgagccagggcaacatcgaacaggccgatgcgcctgaacgcgtctggcgtgaaccttcgacccgttttgtgctcgagtttatgggcgaagttaaccgcctgcagggcaccattcgcggcggccagttccacgtcggcgcccaccgctggcctttaggctataccccggcataccaggggccggtcgatctgttcctgcgaccgtgggaagtagatatcagccgccgtaccagcctggattcgccgttgccggtgcaggtgctggaagctagtccgaaggggcactacacccaattagtcgtccagcctcttgggtggtatgacgaaccgctgagcgtggtgctggcgggcgatgaggccccgtcccgcggcgaacgcctgtttgtcggcttgcagaatgcgcgcctgtataacggaaccgagcgcatcgagccgcgcggcgaacttgctctggcagagtcggcctgatagcttaaatccacgtgcttttgccgggcggctcagcgctgccccggctgacagcccggagcgcatgatgcggccgggctttttattggacagctgaagtgaacacattagaacaaacaattggcaacacgccgctggtgaaattacaacgtctggggccggacaacggcagcgaaatttggctcaagcttgagggcaacaacccggcgggctcggtaaaagatcgcgccgcgctgtcgatgattgtcgaagcggaaaagcgcggcgaaattaaacccggcgatgtattgatcgaggcgaccagcggtaataccggtatcgcgctggcgatgattgcggcgttaaaaggctatcagatgaaactgctgatgccggacaacatgagccaggagcgccgtgccgcgatgcgcgcctacggcgctgaactcatcctggtcaccaaagagcaggggatggagggcgctcgcgatctggccgccgcgatggccgagcgtggcgagggtaagctattggatcagttcaataatccggataacccttacgcccattacaccaccaccggcccggagatctggcgccagacggacgggcgtatcacccactttgtttccagcatgggcaccaccggtaccattaccggcgtatcgcgttttctgcgcgaacaggcgaagccggtaagcatcattgggctacagccggaagagggcagcagcattccggggatccgccgctggccgcaggaatatatgccgggcatttttaatgcctcgttggtggatgaggtgctggatatccaccagcaggatgcggaaaacacgatgcgccagttggccgtacaggaagggatcttctgtggcgtcagttccggcggcgcggttgccggggcgctgcgtattgctcgcgccaatccgggcgcggtggtggtggcgatcatctgcgatcgcggcgatcgctatctctcaaccggcgtgttcggcgaagaacacttcagccagggggcgggtatctaaacgcgctatcacggcccccatgccaggcttgggggtcggttaactaaagtgcgtgtttcgctaccagcttatccagaaacgcccatagtttttgattcatctcgcgataatcccattgcctcatttcatcttcgctgcgaataaagcgcctgccttttgcggcggcaagttcatgttgcgagtgggtaattaataactcaatgacctccgcgtcaaactccatatggcactgaaaaccgtagatccgatcgctatatttgacgatttgccgcgggcacccttcgctggaagccaggacttccgccgcaggcgtcaggcccggcatatcgttgtgccagtgaccgactaccaccgatggtccgaaatgggcgatgttgtcatcctgcagtccggcggtggtcaggatgataggatagtggccaatctctttttccgggctttgcatcaccggcgcccccagcgcttcgccgatgagctgcgatccgagacaaatcccgaccacgatacgcccggcggcaatcgcctgggcaatcaggtttttctcggcatgggcatcaaaccatgggcactcggcaagcgtggtgcgtggtgattgcgggccgccaagtaccaccagcatatcaaaaccttcagcattcgccggcagcggatccccggcataaactcgcgaccagctggcctgatagccgcgcgcgttaacccagcgcagataggcgccaggcgcttcaaaaacttcatggacgataaagtggatccgcataacaactcccgtgtttaacaaggtaagaccagcgataaatcgtgtgcaagttgttcaatttgcgcctcggttaaggcgcccagcgacaggcgcaggccgtgcgccggtgttttcacgccaaaggcttcaccttcacgtaccagccaaccggcccgcgccagacgcaacgccagcggctggctggcggctgatagcggcagccagaagttaagaccatcgccaggcggataatcgccagcgccgtggcgggccaacgcggcggcgagctgctgattttgctgctgataatggcgctggctcgcagtcagagaggcggcaaaagcgctatcattcaggcaggcgaacgccagctcttgtagtaaatggctgacccactggctaccggcgttcaggcgcaggcgcagcgccgccgaggttgtcgggtcgctggcgactatcgccagccgcaaatccgggcccagggttttggacattgagcgcaccagcgcccaacgctgaatgccgtcaggtagcggattgtgccagcatgtcgctgagagcagggcgaagtgatcgtcaacgatcgccagcgtctgcggatagcgggcgagcacggtgcgaatcgcttgtgcgcgctccggcgtcaaactgcagccggtcgggttgtgggcgcgtggagtcagtattaccgcgcgggcgccgttgcgcagtgcttcttcaagccgctccgggtccatgccttcaccgtcgacggcgacagggctgggctggaaaccggcgtaacgcagcatattgatgctgctcagaaagcaggggtcttctaccgcgacgctgtcgccggggagcagcagcgcgcagagcaggcgttccagagcgtcaatcgcgccgctggtcaagttgatgtcaaattcctggccgatatcgcgactgacccactcccgggcccagtcagccagctgtggctcaacggcggcatcgccatataagtgcggggtctgcgccagctgcggaagaaaacggccaatatccggcagacatcgtggatccggattgccgccggaaatatcaatcagcgatgtcgttggatcgccaccctcgaccgcattaagcgtattgcgcgccttaatggccgtgccgttacgcccctgactgacggcgagccctgaagtcaccagccgcttgtaggccgccgccaccgtattgcggttgactgccagttcgcctgccagttcgcgcaccggcggcagcgcctcgccgggttgcaacgcgccgctctgcaccagatgacggatgttatcgaaaatctcgcttgcggtttttccggtgaacattattgacctatgacaaaatgaattttagcataggacgaatgataatcagagtatgacccgctgtccagcggggggagaaaggatgagtcagcaagacgaaatacagtccgtgctctttaacgaccacagccgggcgctggaggttgatattgtggcggtgcaatcgcaggtggtatacggcagtgtcggcaacagtatcgcggtaccggcaatcaagcagcatgaattacgggtgatggcggtgccgacggtgttattcagcaataccccacattacgatactttctacggtggagtgatcccggaagagtggtttagcggctatctgcgggcgctggaggagcgtgatgcgcttcgcgagctgcgggcggtaaccaccggctatatgggcagcgccgggcaaattgcgctgctagcgcagtggctgcagcggatccgcgtgcatcatcccgacctctgtattctggttgacccggtgattggcgacgtggatagcggcatttacgtaaaagcggagatccccgaggcttatcgccgccatctattgccgctggcgcggggtatcacaccaaatctgttcgagctcgaaaccctcagcggcatgccgtgccacaaccagcaggaagcggtggtcgccgcgcgaagtctgctttccgatacgctaaagtgggtggtgattaccagcgcgcctggaccggatgcttcgactattaacgtgctggtggtcaccgacgacgcggtcgaagtggtcgtccatcctcgcgtcgaaaccgacctcaaaggcaccggcgacctgttctgcgccgagctcatcagcaacctggtgcgcgacatgtcgttgggagacgctacgcgcgccgccgctcagcgcgtgctggcggtaatgacctggaccgagagtcagggctgcgatgaacttattttaccgccgtctggagcgcaataacgatgcatagctatcggttagtggtacgcagggagggaagaaccgtcggccatttcgagacaacgggaatgaacgcgctggaagatgcctgtagggcgaggtcgttgtttgaaagcgatcctggctaccagtgcgagctatgggtcgcggatagcgaacggcggattctggaaagtagccagcaggggatgaaaatcctggcgagtgaaaagtgctaccgcccagcataaaaaaatggcgccttcaggcgccattttctcggcaagcaagaattacttcttgatgcggataaccggagtttcaccaacggtgacgctaccggacagtttgatcagctctttgatctcatccatgttggagataacaaccggagtcagggtagacttggctttttcttccagcagcggcagatcgaattcgataaccgggtcgccgactttcacgcgctgaccttcttcagcgatgcgcttgaagccttcgcctttcagttcaacggtatcgataccgaagtgaacaaacagctcaatgccgctatcggattcaatagagaaagcatggttggtttcaaaaattttaccgatggtaccctctaccggcgcaaccattttgttgccagtaggtttgatggcaatgccatcacccacaattttctccgcaaaaaccacatccggcacgtcttcgatgttgacgatctcgccagagagcggagcaacaatctcaatagttccggtgtcttttttgtcatcagaaaccagagatttcagtttatcgaacaaacccatgatcttctcctaagcagtaatttgggccgcgcatctcgtggattagcagattgttttttcttcaatgaacttgttaaccagcgtcattaactcgtccgttgtcggttgagcaagagcctgctctgctaatactttcgcatcttcgaagttcgtgttacgaataatcttcttgatgcgcgggatggaaatggcgctcatagagaattcgtccagccccatacccagcaacagaagtgtagcacgttcatcgcccgcaagctcaccacacataccagtccatttgccttctgcatgagaagcatcaataacttgcttgatcagagtcagcacagacggtgacatcggctggtaaagatgcgagatcatatcattaccacggtcaactgccagagtatattgcgttaaatcattggttccgatactaaagaaatcaacttctttggctaaatgacgagcaatagtcgcggctgccggggtttccaccatcacgccgatctcaattgattcgtcaaaagctttaccttcgtcacgcagttcctgtttgtagatctcaatctctttcttcagtgcgcgcacttcttcaacagagatgatcatcgggaacatgatgcgcagcttaccgaaagcggaggcacgcaggatagcgcgaacctggtcgcggaggatctctttacgatccatcgcgatacgcacggcacgccagccgaggaacgggttctcttctttcgggaagttcatgtacggcagctctttatcgccgccgatgtccatggtgcgaacgataacggcctgtgagccgcacgcttcagccaccgctttataggctgcgaactgttcttcttcagtcggcagagaatcgcggtccatgaacaggaattcggtacggtacaggcccacgccttccgcgccgttgcgctcagcgccgtctacgtcgcgaacggtgccgatgttagcgcaaacttcaacctgatgaccgtcgagggtgatggccggcagatcttttagtttcgccagttctgctttttcttcagcaacctgcgcctgcagcgcacgcagctcttcaattttttcgttgctcgggttaaccagaacctggttgttaaccgcatcgagaatcagatagtcgccgtttttcacctgggaggtgacgcttccggtaccgacaattgccggcagctcaagtgagcgcgccatgatagaggtgtgggaagtacggccgcccgcgtcggtgatgaaacccagcaccttgttcaggttcagctgtgcggtttccgacggggtcagatcggcggcaacgaggatgacttcatccgcgatagcgctcagatcgatgattgccaggcccagaatgttgcgcagcagacgtttaccgatatcgcgtacgtcagcggcacgctctttcaggtattcgtcatccagctcttccagtgcagttgcctgaccttcgataacttcattggctgccgcatcggcagtcatgtgcttatctttaatcagggctatgatttcctgctcaagctcctcatcttccagcagcataatatgcccttcgaagatggcttctttttcttcaccgaaagtttcaccagctttggttttgatgacctccagctgggcggaggccttggtgcggccgttcaggaaacgttcaacttcctgatcaaccttatcggcagaaattttcttccggtcgatgacaatttcatcttctttcagcaggagagccttgccgaaagcgatacccggggatgctaaaatgcctgaaatcataaccctaccttacttgtgactgatattaaaaagaacccgtgaacttactcgagttcagccatcagtttaaccagatgctcaactgctttttgctcatcttcgccttcagcggagatggtcacaacggtaccctgagtcaggcccagagtttgcagtttgaacaggctttttgcgctggcgcttttgccgttggaggttacagtgatctcagaagtgaagcctttcgcttctttaacaaactgagcagcagggcgggtgtgcagaccgttcggagcggtaatggtaacttcttgctggaacattatatttccccaacttataggtttagtgttgtggacctaaagtctagcctaacgaccaaactttagcctgtattgttagcgccggcgttacgtgtgtggctaaggcgtcagcagcggaaccgctgagaggaccttaagtccgttgacgtctagcacttcattaaacattatgccgcgaaaggaagacttgaaccaaatcataaaatcgattcagcctgcggaaatccaaatctgaataatttcgcgcttcaaaataaatgtgctggttaaataccagaccctacgaggtgaatcaatgccaggaggggtaaaactttgacgtatgccacaaaaaagcacccgaaaaggtgcttttttacacggtttttacaaactggcactactgttgcaattctttctcggtgaagagatctgcgaacagcgccgtgcttaaataacgctcaccagaagacggtaggataaccacaatattcttattggtaaaggcttcatcttcctgcagctttaacgccgcggcgacagcagcgccggaagagataccggccagaataccttcttcttccatcaggcgacgagcggtggagatggcttcttcgttggtgatggcgaccactttatcgaccagtttcaggtcgaggttgcccgggataaagccggcgccgatgccctgaattttgtgcgggccaggtttcagctcttcaccagccagcgcctgggcgataaccggcgagtcggtcggctcaacggcgacggtaatcagatcttttttacctttagtgcctttaatataacgagaaacaccggtcagggtaccgccggtaccgacgccggagataaagacgtcaacctggccatcggtgtcttcccagatttccgggccggtggtcttttcgtgaatttccgggttagccgggttactgaactgctgcagcagcagatatttttccgggtcgctggcgacaatctcttccgccttctggatggcgcctttcattcatggtttccggcatggtcagcgtcagtttgtagccgcgagcggcggcgacgtaggcgagggcgataccggtgttgccgctggttggttcaaccagttccacacccggtttcagtacgccgcgcttttcagcatcccaaatcatattggcgccgatacggcatttaacgctaaagctcgggttacgagattctaccttggccaggattcggccattaccgatgcggttcagtcgtaccagcggcgtatgaccgattgtcagggagttgtcttcaaaaatcttactcatggcccgtccttaactgtatgaaatttgggggtacggcttcagcatacccgcttaaacaatatccggaagtaaggatttagcatatctatatgctgaagggaaataatgatgagcaagaaggaataagacggaaataaggggcggcgtgaaccgccccgaaagagagagctaagcgcactatttccacatcgcgtgcttatcgcgatagcaatccacccacatcgccgtcgcgccgcagatagcgactggcagaataaccaggttgagaaccgggatcatggtgaacaggctggtcagcgcgccaaactgcatgttgatgaccttccgcgaacgcagcgcctcgcgcatggttttaaacggcactttatggttatcgaacggatagtcgcaatactgaatggccagcatccaggcgctaaacaagaaccacagtaccggcgcgacggtttggccaatgccggggataaagtacagcagtaacagaacgatggcgcgcggcagtacagcaactttgccattcgcgtttcatgatgcgcggacatccttcatgatgcgaatatgccaacgtcgggcggcgtcgcgcggtcagtcgcgcttcgagctgtcgcagcagggcgctaaacggcgcggcaatccagttggcgatggtcgaaaagtaagtaaccaaataccaacaaaatagagataaccgcagccggccacagcaggtagtttaaccactgaagccattcaggcacatggctcattaatgaagggatccagctatcgaggcgggtaaacagccaccagaacgcgccgcccatcagaatcacgttaactaataaaggcaggaacacgaaacgtcggatccctggcagcctgatgagtttccagccttgtgaaaaatagtagacgccgctacgtggggtagttgcggatgatgaaaccatagtcaggcgatgctccttttttaacattcagtgtgaatgcccgcttattttatcgggttgtcagacaataaccagttaggaaatgttcgaaaaaacagcaaaaagcacgatttagttcatctttatggggtgaaaagggcagacgcacttgcacttgatgtaatcggcaaatactcttagtgagtaaatgtttgccgtggtggcaaggtgttagaacaacagagaatataatgatgcaggatttgcgtctgatattaatcattgttggcgcgatcgccataatcgctttactggtacatggtttctggaccagccgtaaagagcgttcctcgatgttccgcgatcgcccactgaaacgtatgaagtctcgcgacgatgaaacatcggaaggcgatgactttgatgacgatgttgaaggcgtagggaagttcgcgttcaccgggtaatcacgcccgaacggcgcatatggggagcaagaagcacctcgtcaggcgccgcaacaccagtatcagcctccttatgagcgtcaggtgcagcagcctgtgcgtcaggtgcagcagcctgtgcgtcaggacgagccggttcatcaggcgccgccgcacgcgccgcgcccgcagcagcctgttgctccgcagccgcaggcccagccgccgcatcatgttgcccctgctcagccggtacatccagcgcagccggtccatcagccgcagccggtaccgccgcaatatcagcagccggtgcagccagctccgcagcagcctgtagctcaacagtcggcaccagtcccacaacctgttgctcaacaacctgcgccggttcaacagcctgccgcgccgcagccgcaaccggcccctgaagcgccagccgctgaacctcagcagccggccgccgcgccgcagccgaaagagcgcaaagagacggtcatcgtgatgaacgtcgccgcgcatcacggttctcagcttaatggcgaactgctgatcaacagcatccagcaggccggctttaagtttggcgatatgaatattttccatcgtcatttaagcccggacggtagcggacaggtattgttcagcctggcgaacatggttaaacctggcaccttcaatccggatgcgatggtggatatgaccacgccaggcgtgactatctttatgcaggtgccgtcgtttggcgacgagctgcaaaactttaaactgatgctgcaatcggcgcagtacatcgccgatgaagttggcggcgtggtgcttgacgaccagcgtcggatgatgacgccgcagaaactgcgtgagtaccaggatcgtattcgcgaagtaaaagaggctaacgcctgatctacgcgctagcgtgtcgtctgcttaatctgaacccccgcccgtcgggggttttttatcattgatggtgcgttatggaaccaatcgaacaaaaactgactgaactgcgaaccacccttcgccatcatgaatatctgtatcatgttatggacaccccagagattcccgatgcggaatatgaccggttgatgcgcgaactgcgcgaactcgaagcgcaacatcctgagctgattacccctgactcgccgacccaacgcgttggcgcggcgccgttggcctctttcagccagattcgccatgaagtgcccatgctgtcgctggataacgtctttgatgaagagagtttcctcgcctttaacaaacgcgtgcaggaccgtttaagcgatacggcggatctgacctggtgctgcgagctcaagctcgatggcctggcggtcagtatcctctatgaaaacggcgtgctgatgcaggcggcgacccgtggcgatggcaccaccggcgaggatattacctccaacgtgcgaaccattcgcgctattccgctgaagctacgcggcgacaatatcccggcgcggctggaagtgcgcggagaagtgttcctgccgcaggccggatttgaaaaaatcaatgaagaagcgcgccgcaccggcggcaaagtatttgctaacccgcgcaatgccgccgcgggttcgttgcgccagttggatccgcgtattaccgcgaagcgaccgcttactttcttctgctacggtgttggcgtgctggaaggcggtgaactaccggccagccactccgcgcgtttgcagcagtttaagcagtggggattgccggtgagcgaccgcgtgaagctgtgtcattctccagaggaagtgcttacttactatcgccaggttgaagaagaccgtccgaaacttggttttgatattgacggcgtggtgattaaagtcgattcgctggcgctgcaggagcagcttggtttcgtcgcccgcgctccgcgctgggcggtggcctttaaattcccggcccaggagcagatgacttttgtcaacgatgtggaattccaggttggccgtaccggagcgattacgccggtagcgcgccttgaaccggtgcacgtggccggggtgctggtcagtaacgccaccctgcataacgccgacgaaatcgaacgtttaggtctgcgtattggcgacaaagtggtgattcgccgcgcgggggacgtgatcccgcaggtcgtcaacgtggtgctttctgaacgcccggaacatacgcgtgaaatcatcttccccacacattgtccggtatgtcattccgatgttgaacgggtggaaggggaagcggtggcacgctgtaccggcgggcttatctgcggcgcacagcgtaaagaagcgctgaagcactttgtctcccgacgggcgctggatgtcgacggtatgggcgataaaatcatcgatcagctggttgagaaagagtacgtccatacgccagccgatctgttccggctcagcgccggtaagcttaccgggctggatcgcatgggaccgaaatcggcgcaaaatgtggtcaacgcgctggagaaagcgaaagagacgaccttcgcccgcttcctgtatgcgttaggtattcgcgaagtcggtgaggcgacagcagcgggactggcagcgcattttggcactattgaagcgctggaacaggcttcgattgaggagctgcagaaggtgcctgacgtcgggattgtcgtcgccacacatacttttaacttcttcgccgaagagagcaaccgcgaggtcatcgcgcaactgcgcgctgaaggcgttcgctggccggcgccggtggtggtgaaggcggaagaaattgacagtccgtttgctggtaaaaccgtggtattaaccggtagcctgagccagctgtcgcgcgatgatgccaaagcgcggctggtcgcgctgggggcgaaagtcgccggcagcgtgtcgaagaaaaccgatctggtgattgccggcgaagcggcgggctctaagcttgcgaaggcgcaggagttaggcattgaggttatcgacgaagccgaaatgatgcgcctgctgggagaataacgtggataaagcgcagctcatcgagattgctaataccgagatgccatttggcaaatataaggggcgccgtttgatcgacgtcccggaagagtatttgctgtggtttgcccgtaaggatcaattccctgccgggcatctcggcgagctgatggcgttgaccttattaatcaagaccgaggggctgacgcaactggtgcagccccttaaacaaccgcgttaacctgccgtagcgcgggatttctcctgcgcctgttgggcgtctgtctgcgctttatagcgacgagccagtacggcgcagaccatcagttggatctgatggaagatcattagcggcagcaccattatccccagaatcgatgccgggaacaggatattagccatcggtatcccgttcgccaggctctttttcgagccgcagaagacgatggtaatttcatccggcttgctaaagccgcagcggcgggcgacaaaaacgttgatcgcgatgacaatagccaacagcaccagactgacaacgacgataaacagcagcgatcccacgcccactttgtgccagatccattgacgacgcttcgctgaaggcggagtagaccaccagcaagatcgaggtctgatcggttttgccaatccattttttatgtttcgccacccagctaccgatccacgggcgcgacaagtgtccaagaacaaacggcagcagcagttgcagcataatcttaccgacctgttccagatcgccgccagcgccatgcaaatgcatcaacagtcctaccagcaatggcgaaacaaaaataccgagcagacttgatgctgaagcggaacagaccgccgcggcgacgttaccgccggcgagcgaagtaaaggcaattgctgactgtacggtcgccggcaatatgcaaaggtaaataaaaccgctatagagcatcgggtcgaccttaatcggcgcccaccacgcaaacagaacccccagaaccggaaaaacaataaaggtgctgcacatcacccacaggtgtaaacgccagtggctgccaccggcgataattgcttcacgcgacagcttggcgccgtgcataaagaataacagcgcgatggcggcggtggtgagatgctcgacgaaagggacgaattcgccgcgcgccggaaagaacgaggccagcagaaccacggtaatcaatgtcagtgtaaatggatcaagaatgcggaaaagtttcataaacgctcctgaaattcgatgccgctattgtgctttctttgttttgagaaataaaattgatttattgcatctattcatgaataaaacagatgaattattcgttacgtcagttaaaggtctttgtcaccgtcgccagggcgcgcagttttagccgtgccggggaaattattggtcttagccagtcggcagtgagccatagcgttaaggagctggagcaccagaccggcgtacgtttgctcgacagaacgacgcgtgaagtggtgctcaccgaagcaggccatcagttggcgggcaagcttgagcgtttgcttgatgaactccatgtgaccctgcgtgaagcggggcgggtagggcagcagttgacggggaccgtgcgcgtcgccgccagccagaccatctcggcgcatctgatcccgcaatgcatcgctcatagcaatcgccgctatccggatattgatttcgtactgcatgacaggccgcagcagtgggtgctggaaagtatccgtcagggcgaggttgattttggtatcgttatcgatccggggacggcggcagacttgcagtgcgagtcggtgttggcggaaccttttctgttgttatgtcgtgaggatcaccgtttttcccggcagttatcggtcaactggcaggagttgcaaggggagaggctggtattgcaggactatgcttccggcagtcggccgctgattgatgccgcgctggcgcgtttcgccatcaaagccgatatcgtgcaggagattggtcatccggcgacgctgttcccgatggtggaatcggggattggtattagcgtgctgccggcgctggctttacccttgccgcagggcagccgtttgcaggtaaaaagattaaccccggttgtggagcgccaattgatgctggcgcagcgtaaaaatcgctcgctgtcgaccgcggcgcaggcgctatgggagatcgtgcatgaagagggggcaaacctgacatcagccaggatcgaggacccgctttatcagcgctaagcgtcattcttaacgctggtggggaacgctacttttatactgcacaatcgtagatatttccttttctcatgcctgatgaaaaccctgctttagtcggttcagaaatcaacagccccaatttgaatcattgtttaaatacactacgttcgatcaacttgtttacactatacagagaatagagcggagcgtgtcattgtcgggcggccgagctgttgaattttccacatgctatttgagaatggtaaaaaatggaattatcagtcccttttatgctcgttattatttccattgcttcgctgcttgctcagtggttggcgtggcgattacgtataccttctatcctgccgctgttgctcatcggcgtactacttggccccggggtgcatttattgcaaccggatatattatttggtcctctacttttcccactggtatcgctgtcggtgagccatcattctgtttgaaggggccctaacgctacgctttgatgagattcgcggcttgggtggtattgtgcgcaatttagtcacagttggaatgttgattaccttcgccgttatctcactaacctgctggggaattttaggcctcacgccgcagatttcagcgctgatcggggcggtcacggtggttacagggccgacagtgatttctccactcatgcgagtggttcgcccaacagcctctattaatcaggtactgcgctgggaagggatcgtcattgatccggtgggagagcgatttttaccctattagtatttgagtttattactttgcaggagcaaacgggcacatggcttcatttgctgatcatgcttacaaaaacggtcgttatagggctggtgagcggggcggtgtttggcgttttcttagggaatgcgctcaggcgtggttggatcccgggttatctgcaaaacttcgctgttttatccttcgttctattgacgtttggcgtgtccaatacgctggcggatgaatctggtctgcttgcggtaacggtcctggggatctggctggctaatatgcgagaggttgagacctcggatatcgttgaatttaaagaagagctatccgccatcttactttcagcgctatttatcatcctggcggcccgtcttgatatccatgcactctgggcgatgggctggccgctgctgatattgatgcttatcgtccagtttgtggcccgtccactatgcattcttgtttcgacatggcgttccagcttgcattggcgtgacaggctgatgttatgttggatcgccccgcgcggaatcgttgctgccgctgtcagttccctgtttgctttgacgctgcaaaaaaaaaggctatgagaacgcggatcagctggtaaccgtcgttttcgcaatcattataggtacggtagttttgcaaagccttaccagcagtcaattggcgcgctggcttggcgtgcagcaacgtaggcctcgaggagtgctgattgtcggggcgaatacggtcgccagaaccctggcccaggcgctcagaaaactcgatattccggttcagctgagcgataacagctgggaatactaccggctggcaagaatggaagggttaccaacatattatggcaatgtctggtctgaacatgcggaaaactacctgaatctgagtgagattcgtcaggtgatcgccttgtcgccaaatcgtcaccagaatgcgctgaccaccctgcattttcagcatatatttggtaataatcgcgtcttctcaatccgtacggggcctgtgactaaaggacgtagtgagaaagaaacgcgtcacgaacagcttttcgatactgatatgacctgggcacggcttagtagcctgatagcgaaaggcgcagtcatgaaagtcactcgcctgaataacaattttggctggccggagtatctcagcaccaaccccggtgcaacaccgctgtttgcgcaaagagaggatggcaatctgatagcgattaataatggaatcatgccgccgccaccctgtaccgtcgtggcgattatcgaacctggagtggaaagtgaaaaaattccgtcagaagcgtattgatagcctgttcttcattgttggctgtcgttgcaggccgttccgctatctggcgttctgcgcatagcaaaaaggcgcctttagggcgcctttttacattggtgggtcgtgcaggatgactcggcttcgcctcgcccttcgggccgtcgccgcaagcggctccgttgtctcactgcgttcgacccgaacctgctgcaggttcgaatcttaaagttctgcgcatagcaaaaaggcgcctttagggcgcctttttacattggtgggtcgtgcaggattcgaacctgcgaccaattgattaaaagtcaactgctctaccaactgagctaacgacccgaagtggtgggtgatgacgggatcgaaccgccgaccccctccttgtaagggaggtgctctcccagctgagctaatcacccacttcggtacttcacattttgacagaaaatccagctggcaagaaagtggtgggtgatgacgggatcgaaccgccgaccccctccttgtaagggaggtgctctcccagctgagctaatcacccacttctcaattttctgttctacacggcggagactacgtaaagtagttggtgggtgatgacgggatcgaaccgccgaccccctccttgtaagggaggtgctctcccagctgagctaatcaccccccgctgtgtggagtcgcattatagggagagttgaaattgagtcaacgccttttcgaaataatttgtttgttcgtcgtaaaattaaacaaagcgatcgcaaaaccagcttcggcgtatgatttataaacaaaaatggtaaagcgtgatgttgaggcgggatctacattgaggaatcagcccgtggtgttagaatattcccctatcaattccaagaacactgccgactatcggcatctttattaaacgtaaggccaattcatgaaaatcaaaactcgcttcgcgccaagcccaacaggctatctgcacgttggcggtgcgcgtactgctctctattcctggctttttgctcgtaaccacggcggtgagtttgtgctgcgtattgaagacaccgatctcgaacgctccactccggaagcaattgaagccatcatggatgggatgaactggctgaatctggagtgggatgaaggtccgtacttccagactaaacgtttcgatcgctataacgcggttattgatgaaatgctggaagcaggtaccgcttataaatgctactgctcgaaagaacgtctcgacgcgctgcgtgaagaacagatggcgaacggtgaaaagccgcgctacgacggccgctgccgccatgatcatcagcatcacgccgccgatgagccttgcgtcgtgcgttttgccaacccgcaggaaggttcggttaactttgacgaccagatccgcgggccgatcgaattcagcaaccaggagctggacgatctgatcattcgccgcaccgacggctccccgacctataacttctgcgtcgtagttgatgactgggatatggcgatcacccacgtgatccgcggtgaagaccacatcaacaataccccgcgccagatcaacatcctgaaagcgctgaatgcgccggtgccggtttatgcgcatgtatcgatgatcaacggcgatgacggtaaaaaactttccaagcgccacggcgcggtgagtgtgatgcagtaccgtgacgacggctacctgccggaagcgctgctgaactatctggtgcgcctgggctggtctcatggcgatcaggagatcttcactcgcgaagagatgatcgagttcttctcgctgggagcggtcagcaagtccgccagtgcgttcaacaccgataaactgctgtggttaaaccatcactacatcaacacgctgccggcggaatatgtcgcgacgcatctgcagtggcacattgagcaggaaaatatcgatacccgtaacggcccgcagttgtccgaactggttaaactgctgggcgagcgttgcaaaacgctgaaagagattgctcaggctgccgttacttctatgaagagttcgccgagttcgacgccgatgcagcgaagaaacacctgcgcccggtggcgcgtcagccgctggaagtggttcgcgataagctggcggccattagcgactggacggcggaaaatgtccaccatgcgattcaggcgactgccgatgagctggaagtgggcatgggtaaagtgggcatgccgctgcgcgtggccgtaaccggcgcgggtcagtctccggcattggatgtcaccgttcatgccatcggtaaatcccgtagcgttgaacgtatcaacaaagcgctggcgtttatcgccgaacgcgaaagccagcagtcctgaggccgagcgtaagctaaagcaagcggcaggttaatcctgccgttttttttcgccgctattttgtcgcagtgttaatacctagccgcgccaggaagccactaataccatcgcgagcaagaagatcgcgcaggtgagtttgttctgcggcggtcatcagctgcagcgtatcggcgatttgccgccataccgcatccgcttcattgataaagtagccgctgggctgttcggcgagctgatactcttcattcagatgacgaaatgccggaatattggtcagaaaatcgatcactggccggtcgatgacaattaaacgcgcacgcccgcctttgacgccgggaatcgcctcggttcgccacttttgttcccgcgcccagcggttgaccgtttgtctggccagacccagaacctcggcaagctctgcaggcgtcattttttctttcagtttcatcattcgttttttactggccgcgtattccaagacggtttaacaacccggttatgccttcacgcagcagcagcgacattagctgcttctgttcgcgatgagtcatctctttacagagcgtcagcaataatggctcgagatcggtctcggcgaccgaatagggcgagggcgtttccgctacgcgctgggcattgcggataaactctcgtacctgctcgttaacgtgtacgagacgcgctttgcctccctgcacgccaggccgcggagaagtttgccacccctctttacggacccatttatttatcgtctgtcggctgaagccagttagatgcgcaatttcttccggagtcattcgttccttgagcatactatttcctgagtaaatatgtgggaattagtgcttcatgttatagcatccttttacaggaaatagtgacatgtttaacgcctgcctgcgataaggctcgcattgtcagctatttgcctgctttttcagcgattgaatcaggaggggtaattttgccgttgacacctggcgaaggaattcatattatgccgcccgtcaacacgacacgctttacgttacggggctatagctcagctgggagagcgcttgcatggcatgcaagaggtcagcggttcgatcccgcttagctccaccaaattctgcaacccagcggatttggttcgtaaagaggtcctgtggggctatagctcagctgggagagcgcttgcatggcatgcaagaggtcagcggttcgatcccgcttagctccaccaaaattcgaaccctcgctacggcgggggtttttgctttttgcgccgttaatgtaaatgacgttaagcttacgtcagcgtgtatcgagcaaataaaaaccaacgtaatttaggaatttttctcgatttattttcttgcctgccattattaaccaacatactattttctgattgcttataattttttagccgcagaggtgttgattaacaataatgactgacatatttaacatcaaagttaaaaaaactctgctggcgttaattgtttgtttgatttttattccgctatctcgattaatttctccgcaaacccttatcgacggaaaacaaatttatctggcatggctgccattaagcgtaatgtacgcaaccatttgtatttttggccgttacgccgttgcccccttgattgttgcgtttgcaattactaatacatttgtaatagatctaacttatacacaggccgctatcctgttattttgtcagttattttccgtctttttcaccttcgctatcatgcgctcgttgtcggggaaaaaatggcgtagcggaaggcctgccaagcgccatatcggtcgccgtatcttctggggcggcttctttgcccccattctgcttaagctgacgatgtatctggcggggcgcttcttcgccttcccgcttgccgtctccagctacttcagtaccgcgtcgatcatctattccgttattgatatccaggcgttgatatgcgccgccttaatctttactaccgctttctattacccgatgagaatgatggtttgcccacgttaccggcgggtgttttggttgcgtcattgtcaaccgtggctggtgaaaaaaagaagagcctttaccatatattggtttatggcattaatcacaatcatgctggtgctttgcgcgccttttgattcagatttaattgctggatatctggtgccgattatttttattctctacttcatcggtatcggccggctggggcacgaattaattcgcattacctgggctatttcggcattctttttagtggcctataacaaaaattttctccagggcgttcaatcggggtactccttgtcatttgtcctgtcggtgttaatttcattcacgatttgtttgttttacatgacggatatttattcgcgtagcgagagaattaaacagcgctggcgcgatcgggctgaagaagatccgttaaccgggttacccaatctgcgggcgctggaagggcatttgcgccaatcgcctcgggttgttattagcagcctgcgtatcgaaaacctggacttccttagccgtcactacggcatgatgatgcgtgtagagtgcaaacggcaaatagcccgccgtctgcagccgctcctggatcaccacgataaaatttatcagctcccgggtagcgagttattgctggtgatagaggggccggaaccggcggcacggttaaaccacatcgtctcgatgcttaaccacgctaaatttaactggcataaccaggatctggatttagagtttggcgcggcgtgggggagttacagcggcattgagaccgaattacaccccatgcttggccagcttagctggttatcggagcaggctggcgccgtgcagcgggtgctggcgttagatatcgcgcaggaagaggtttccgatcaaacgaccgaacaggtacggatgctgacgaaaataaaacaagcgctgaacgagcgtagcctcctgctgtatgcgcagccgattcagaacgcagaaggggagggctattacgaaatcctcacccgtatgcgttgcggcgagacgattatcacgccggatcgttttattccgcttattgcgcagttcaacctcagccagcgtttcgatatgctggttctggaaacgctgttcagccagatcgatcaccatcctggccgacgcttctccgtcaatttgctgccgtatacgctgatgcaaaaggatagcgccgctcagattatcgcactgtttaagcgttatcgcgtatcgcctgcgtatattacgattgagataaccgaggagcaggcgttctcgaatgcggataccagcatgcataatattcagctgctgagtgagttcggttgcgctatcgccattgatgacttcggtaccggttacgcgaactatgagcgtctgaagagcctgcaggcggatatcgtaaaaattgacggctgcttcgtgcacgaaatcgagagcgaccagcttgatgcgattatcgtcaaatccataatcgaaatcgcgcgggcgaaacagcttacggtagtcgcagagtacgtcgagacagaggcgcaaaaggcgatgctgttggcgctgggcgtcgattatttacagggttacctgattggcaaaccgcagccgttaagcgaattaaaggcgtaaaaaagccgggcgataacgctgcccggcttgttatgctattaacgtcagtttgggattacagcaccagcgcagcgatggaagctgacaacacgctgaccagcgtggaaccgtaaaccagtttcaggccaaagcgggaaaccacgttaccttgctcttcattcaggcctttaattgccccggcgatgataccgatagaagagaagttggcgaaggagaccaggaagatagagatgataccttccgcacgcggggagagcgtcgctgccactttctgcagatccatcatcgccacgaattcgttagacaccagtttggtcgccataatactgcccacctgcagcgcttcgctcgccggcacgcccatcacccacgcaaccggatagaagatgtagccgaggatcccctggaaggagatgctgtagccaaaccagccggtgacggtcgcgaacagggcgttgagtgcggaaatcagcgcgataaagccgatcagcatcgccgcgacgataatcgctactttaaagcctgccagaatgtattcgcccagcatttcgaagaagctttgaccttcgtgcagattggacatctgcaggttttcttcgctctgctcaacgcggtacgggttaatcagcgacaggacgataaaggtgctgaacatgttaagcaccagcgcggcaaccacatacttcggctgcagcatagtcatatacgcgccgacgatagacatcgaaacggtagacatcgcggttgccgccatggtgtacatacggttgcgcgacattttgccgagaatatctttataggcgatgaagttttctgactgaccgaggatcagcgagctgacggcgttgaaagattccagtttacccatgccgttaactttcgacagcacggtaccgatagcgcggatgacaatcggtagaatgcgaatatgctgtaaaataccaatcagcgcggaaataaagacgattgggcacaaaaccttcaggaagaagaaggccagacctttatcgttcatgttaccgaatacgaagttggtgccttcgttggcgaaaccgagaagtttctcgaacatctcggaaaagcctttcacaaaacccagaccgacatcggagttcaggaagaaccaggccagcaaaacttcaataacaagtaattgaataacataacgaatgcggatctgcttacggttgtgactgaccaacaaggccagtatagccaccacaacgatcgcgaggacaaaatgcaagacgcggtccatatttgctccaaatatgaggcaggttaaatttccgtgcacattctatgcaacaagcctaaataaaacgagatcgaatccacactattgcaaggatatgtgaccaataacaaaaatagtgatcaatcgtacatttttgttatgttatgcaaaggtattaaaagttgcattaatgtactaatctgatgaaaggcgcgttgtccacagcttcacgcccgttttgttgtttggcctactatcgttccctcctatcaaagcaatcattatcacctttctaaatgaacttgataatcattcgcattttgatagcattaaacatagcaaaggctatatttccaggggcagaaaatgactagcagtcgcgttgagaatagcagcggtcgcgcagcgcgcaagatgaggctcgcactgatggggcccgcgttcattgctgccatcggttacatcgatccgggtaacttcgccacgaatatccaggcaggcgccagctttggctatcaattattatgggtagtggtctgggcgaacctgatggcgatgctgattcaggtgttatcggccaagctcggtatcgccaccggtaaaaacctcgcggaacagatccgcgatcactacccgcgcccggtggtatggttttattgggtacaggcggaaattatcgccatggcgaccgatctggctgaatttatcggtgcggccatcggctttaagctgctgctcggcatttccttattgcagggggcggtgctgaccggtgtcgcgactttcctgatcctgatgttgcagcgtcgcgggcagaaaccgctggaaaaagtcattggcgggctactgctgtttgtagcagcggcctatgtggttgagcttatcttctcgcagccggcgttagcgccgctgaccaaaggcatggttattccgagtctgcctaatggtgaggcggtattccttgccgccggggtactcggcgcgacgattatgccgcacgttatttatctgcactcgtcgctgacgcagaacctgcacgatgggtcgcgcaaagaacgctataacgccacgcgttgggatgtggcgattgcgatgaccatcgctggtttcgttaacctggcgatgatggcgaccgccgccgctgcgtttcacttcaacggccacaccggcgtggccgatctcgaccaggcttatttaactctcgaaccgctgctcagccatgccgccgcgacggtttttggtctcagtctggttgccgccggtctctcgtcgacggtagtcggaacgcttgccgggcaggtcgtgatgcaggggtttatccgcttccatattccgctgtggtttcgccggacaatcaccatgctgccgtcatttatcgtgattatgatggggcttgacccgacgcgtatcctggtgatgagtcaggtgttgctgagcttcgggattgcgctggcgctggtgccgctgctaatttttaccagcgatgcgcggttaatgggcgatctggttaatagtcggtgggtaaaacgcatcggttggctgattgtggcgattgtggtggcgctgaacagctggctgattattggttcagcattagattaatacggcaacaaaaaagggagcttgcgctccctttatcaattagtggtgcccgtggccgtgaccacgtccgccgcccgggcctcggccccagccgccacgacgatcgttccagccttcgcgatagccgcgctcgtaagcgcgaccgcgatcccagccgcgtttatcccaaccgcgatgccagccgttatcatggcgatgccagcggtgatcgcgccattcataatgacgacgccagtaatcacggtcgcgccagccgccaccgtcccagtagttaccgtaaccgtcacgatcgccaatttgtaattttaccgatggcagcagggtgatttcaccagcattagcgataaccggcgcgcatgccagtagtaccgcagccagaatcagtgacctgaacatactcttctcctcacgatcgggtcttaaatgacctgttaaccagatattacgagccggtaaagagacgtagcatcagggaactcttaaatcgcaagaaatagcattttttgccaaagtaaaaatgagtttacaccgcaaggatcgcgtcaatagcggcgcactcttcagcgctgaactggcgattgcctaacatgcctacggcatcgtccagttgcgccgttttactggcgccgatcagcactgacgtcaccttatcttctcgcagcacccaggctaacgccatctgtgagagcttctgtccacggcgcccggcaatggcgtcaagttggcggactttttccagccgctcggcggtgagctgttccggctgtaaaaaacggctattgctggctgcgcgggagtctggcggaataccgtttagatagcggttggtcagttgcccgccggcaagcggtgaaaacgctatacttcccacgccttcggcctgcagcatcgctaataatccttcttccacccaacgttcaaacatcgaatatttgggttggtgaatcaggcaaggcgtgccgagatcgttgaggatagtgatagcctgacgcgcctgctcaagcgggtagtttgataaaccaacgtagagcgctttcccctggcgaaccagatgatccagcgcccgcatggtctcctccagcggcgtctccggatccgggcggtggtgataaaagatatcgacgtactcaaggcccatccgcttcaggctctggttgaggctggcgaccagatacttgcgcgacccccagtcgccataagggccgtcccacatggtatagcccgctttactggagatgatgagttcgtcgcggtagggcagaaaatcttctttcaggatccgcccgaagttgctctccgccgatcccggcggtgggccgtaattgttcgccaggtcgaagtgggtaataccaaggtcgaaggcgtgacgcagcaactggcggctgatctctacctgtgtttcatcgccaaagttatgccacaggccgagagatatcgccggtagcttcaggccgctgtgcccgcatcggcggtactccatggcctgataacgcgtgttatttgcctggtaaaccatacttcctccgcatcaaaacagggtgtgtatacgtttacactaatcaatgttgtatgcggagtatatggggaaaacgcgtaaattttgctttccaccctctttgttgctcacaatctggacagttaaaacgcatatctaatactcagattacctgcacaacaacaaggattatggatatgcaaccgacttacaccattggcgattatctgctggatcgtctcgtagattgtggtatcgatcgcctgtttggcgtacctggtgattacaacttacagtttctcgatcacgtgatagcccatcaagatttgggatgggtcggctgtgctaacgaactgaacgcggcctacgccgcagacggctatgcgcgtataaaaggcgctggcgcgctgctaaccacctacggcgtaggggagttaagcgcgttgaatggggtggccggcagttatgcggaacatatcccggtgctgcatattgtgggcgccccttccactggcgcgcagcagcgcggtgaactcctgcaccatacgctcggcgatggcgatttcacccatttctcgcggatgagcgaacaaattacctgtactcaggcgacgctaacggcgggcaacgcctgtcatgaaattgaccgggtattaagcgacatgctgacccaccaccgcccagggtatctgatgctgcctgccgacgtggcgaaagcccgtgcggtgccgccggcccgcgcgctggtcattaagggcccggcggccgatgaaaaccagcttgccggctttcgcgagcacgcggccaaattgttgcgcagcagtcgccgcgtatcgctgctggcggattttctcgctcagcgttacggtctgcaaaacacactacagcagtgggttaagtccgcgcctattacccacgccaccatgctgatggggaaagggctatttgacgaacaaggctcaggttttgccgggacctatagcgggatcgccagcgcgccgcagactcgcgaggcgatggaaagcgccgatgccatcatctgcgtgggtacgcgctttaccgatacgattaccgccggctttacccatcatttgccaacggagaaaaccatcgaaatccagccgttcgccgcgcgggttggcgatcactggttcagccggatcccgatggatcaggcgctggcggcactcattgacgtttctggcaagctgtccgccgaatggagcgcgccagatatcatcgcgcccgacgcttccggcgcgccgcaggggaatctgacgcagaaaagcttctggagtacggtcgagaaacagctgcggccgggcgacattattcttgccgaccaggggacctcggcattcggcatcgcctcattaaaacttccctcccaggcgacgctgctggtgcagccgctatggggctcaatcggctttacgctacctgccgcctacggcgcacagacagccgccgcggacagaagggtggtattaatcattggcgatggcgccgcccagctcactatccaggagatgagctcaatgctgcgcgataagcaaaagctgttaattttgctgttgaataatgagggctacaccgtcgagcgcgcgattcacgggccggaacagcgctacaacgatatcgcattgtgggactggagccgcttccccgatgcttttgcgccggatacgccttcccgctgttggcgggtaacgcaaaccggcgaattggcggaggcgatggccgatagcgttaattccgataagttaacgatggtcgaagtcatgctgccgaaaatggatattcctgatttcttacgcgcggtcacccaggcgctggaaaatcgcaacaaccgcggctaatcgccgcggcgtttggcaatcatcaacggcttcccggccagcagtagccaggccgggagcatcacgatacaaagcagcggcaacagggtggtgtcaggcaccactactgacgccataaacagactcagccagccgtcgcgggtaacgaccagcaccaggccgaggatcgcgcaggagatggtaatggcggccggtaccgcttcaacgtgagcatgcagcattagccccaacgagacgccgacaaacaccgccgggaaaatacgcccgccgcggaaaccgcatgcggacgccagcaccagcgccgccaatttcaccacggcaatgagcagaaaatcgccggcgccaagcgtctggctggaggccagttgctgcatttcgtccagacctttaaatagcgtaatatgtccgccgataacgcccaggatccccagtaaaaaaccaccgattcccagcattaacaccggatttttcagccggtggatgagcgcgtgcagacgcggcagacaccacacggcgaccatgcccacggcgatggcgataagcgtgacaatcgcgccgctgatgatatcgacgatgcgcaggtgcggatagtgcgggattggcagagtgaaattgggatggaaaaaaataccggtcgtcaatgcgcctgccgccgccgccagcagcggggcgaacagccggtcccataacggaacgtcgctgctgttattgagcgtttgcgaaaaaataagcgccgcggcaaccggcgtgccgaacagcgcgccgatggttcccgacgcggcgagaattgtccagtccagcgaacttacccgtggaaacagacgcgaaccgagggcgacggcaagcgctatattgacgaccatgatcggatgttccggcccgagactgacaccgcccgcgaggccgagaatcaatgccgccagtaaccccggtagcgcgttggtggcgatgggcgcgccgatcaaggattcggttgccggatccggccccccatgaccggggctgaaacggactaccagccccacggcaatcccggtgagagtgaggatggcaattatccacagcgggctatcggcggcaatgccgacatgcgccggcaggtcgctccacaagatgctctgcagaatcgcggcgatcttcatcgccacaatcaataccaggctggaagcgataccaataagaatggcgggtatcgataacaacagcatcgttctggcgcgcgggtgcaacatgaagggttccttttaaatgtcctgaagcgctactttgcctgtctctgtaaagagcttcggcgcaaatggtgctgaaacgataaacttaaggccaaacctgacgttgcgtgtaggtcataagatgccgtgttacatagattacaggctaaatgtgaccaatgtcgctaaactaccggcggctgtacgttgggcgttgttgttatgtcgccatgaatttacagtgtgcgaaaagaattattttgactttagcggagccgtaacggaatgacaaaatttgctttagtaggagacgtcggcggaactaacgcccgtctggcgttatgtgatatcgcaagcggggagatttcccgcgctaaaacttattccgggctcgattatccaagccttgaggccgttgtacgcgtctatctcgacgaacaagccgtgaaggtcgatgatggctgcatcgccattgcttgccccatcaccggcgactgggtagcgatgaccaaccatacctgggctttttctattgccgagatgaaaaagaacctcggattcgcgcatctggaaatcattaatgattttaccgcggtgtcgatggcgatcccaatgctcaaagccgagcatctgatccagttcggcggcgcgcaaccggcggaaggtaaaccgatcgcagtctacggcgcaggtaccgggcttggcgtagcgcacctggtacacgttgataaacgctgggtgagcctgcctggcgagggcggccacgttgatttcgcgccgaacagcgaagaagagggcattattctcgaggaactacgcaacgagttaggccacgtgtccgccgaacgcgttctgtccggcccgggattagttaatctgtatcgggcgattgttaaatccgatggccgtttgccggagaacctgcaaccgaaggacgtcactgaacgcgcgctggcggatacctgcattgattgtcgccgcgcgctgtcgctgttctgcgttattatggggcgctttggcggtaacctggcgctgaccctcggcacattcggcggcgtgtacatcgcaggcggtattgtcccgcgtttccttgagttctttaaggcgtcgggtttccgcggcgggtttgaagataaagggcgctttaaagcctacgtgcaggatattccggtttatctcatcgtccatgataacccaggcctactgggctccggcgcgcatctgcgccagacgctggggcatatcctctaaaccactctcagccgggcggcggtgtctgccgtcgcccatctcattacagattcatcaactggcgaaactctttcaccttactgcggctgaccggcacctgaaactcaaggtcgcgtagccgtaggacgtaggtgttgttgaaccatggctctatttcgcgaattttattcagattgacgcagtacgagcggtggcagcgaaagaagtgcgcagccggcagtttgctgcagaattcagtgatgttcatcggcatgacgaatgattcacggcgcgtataaacgaaggtcattttttcatgcgcttccgcgtaataaatatcgtgaatgctggtgacgatgatccgctcgtctttaatcagattaatggtgtcgttttcgcgggttgggttgtgcgcgggcgcgccgctcaccgccacctgctgctgttgctgccaggcgctggacagcttctgcagcatattaataatccgcgattcctgataaggcttaaggatgtagtcaaacgcttccagttcaaaggcttccaccgcatgttctttccacgcggtgataaaaacgataaacggcttatgcgcgaactggctaatattttgcgccagcagtacgccgtccagagagggaatattgatgtcgagaaagatggcatcgactttattgtgctgcaggaatttcagcacatcgagaccgtcgtcaaaggtgccgacgatctccatctggctgtgagtattaatcaaccaggtgagttcctgctgcgccgggaactcatcttccacaataataactttcatgttttctccgctcatggcaacagcgacaccggttcactcgccggggcgtgctggttggggacgtagaacgcaatctccgttcccggcgtcaagcggcggatatgcagcccttcgccgtagagcagtttcacccgatgatgaacattcaacagaccaattttattgcccggcatctcgtcggcttcgacgcgggctaccaccgccgggtcaataccgttaccggtatcccgtacgctaatgcgcacccggtttccgcattcgttgatggcgatggtcaccacgcccttaccccgacagggttgaataccgtggacgatggcgttttcaaccagcggctgaatgagcaggttggggatgacgcagctgacgtcctcgtcaatatcataaatcaccgtcagcttgtcgccgaatcgcgcctgctcgatcgcaatataatccttaatttggtacagctcgcgcttgatgtcgatctgctcgtcatcttttaactcaatgttatagcgtaaatagcgcgacaaattgaaaatcaactgtcgcgcggtatccggattcatgcggatggaagaggagatggcgttaagcgcattaaacagaaaatggggattaattttactttgcagggcgcgaagttccgctttattggccatttctcgtagttgttcagcccgcgagacttcaagctgagtggagataatttgcgacaggccgatcgccatctcctgcagcgaggaggtaatacgatgcgcatggcagtagtaaattttcaacgtgccggtcaccacgcctttctcacgtagcggaatgaccagcatggagtggatctccggcgttctgtaggcttcgtcgttgtttttaatgatgatggtgtcgctttcaatggcttgacgagtggttgggctgatatcgttgttgcgatcgttatagttattttccccgtaaccaacataggccagcacccggtcagtggtggtaatcgcgaccgcatcggcattgatgtcccggcgaataatatcgcaaacctgacgcagcgattcgctgttaacatggcggaacagcggcagcgttttgttggcgatatccaacgccagttttgcctggcgcgccgcgctggcttctttctcgccttccacgctctggaccagcagcacaataaaaccgatgcagatgctgccaaggatcatcggaataccgattttggagacaatatcgatccccagcgccagcgtcggcgcccacagcaccacgaggatcatggttagcgtttcgcacagcatcccggccagaatccccaccttccagcgctgggctttcggaattttgcgattaataagcccggaaagtagcccggcgacaatgctggtgataaagcaggggatggccgttacaccatcaatatcaatgagatagcggtgtaccccggcaatcacgccgacaatcgcgccgacccacggcccaaacaggatcccgccggacatcaccgcgataatccgtacgttgaccagcgaaccctctaccggaacgccggaccaggtgctgaacagcgcaaacatggagaaaatggcggtgaccgccagcagctcgcgaggcgtatgcgccgatttatgcagcagttcgcggaacaggcgtaagcggataagaaaaaagaggcaaatgagcattaatgccgcgcggtcaaaaaccgccagcagcatattaaatatatcgtgcatggatgcgcccaggattcgcgggaaagcaatatgatagaaaacctcacgccagaaggctagcagcagagataaatggggaacaggcttaaaaattaaaggggataagtcgctcactccagctatctggccgtttatgagtaacgatgatacatttgagtattataaatgatatcaatatgttgattgtttatttacgttacattcgttttgggaacacgttctgccgcatactgaggcgtgatgacccgttttacgcgtgggcgattattttttatcaaccctctcgacagcgtgttttttttcaggttattttctaaacgtgccacatcggtggccgcgtcgctcggacggtccgggcgctaacgttaatctgaggaatctatggctgaattcagtcctgaacgccgttttacgcgtatcgatcgtctccctccgtatgtttttaacatcactgccgaactgaaaatggctgcgcgtcggcgcggcgaagatattatcgatttcagtatgggcaaccccgatggcgccacgccgccgcatattgttgaaaaactgtgtaccgttgcccagcgtccggatacccacggttactctacttctcgcggtattcctcgtctgcgccgcgcgatttcacgttggtatcaggaacgttatgacgtcgatatcgacccggaatcagaagccatcgtgacgattggttcgaaagaggggctggcgcatctgatgctggcgacgctcgatcatggcgatacggtgctggtgccaaaccccagctatccgattcatatttacggcgcggttatcgccggggcgcaggtccgttccgtcccgctggtggaaggcgtagatttcttcaatgaactggaacgcgcgatccgcgagagttatccgaagccaaaaatgatgattctgggcttcccgtcgaacccgaccgcgcagtgcgtcgagctcgatttctttgagaaggtggtggcgctggcgaaacgctatgacgtgctggtggtgcacgatctggcctacgctgatatcgtctatgatggctggaaagcgccgtcgattatgcaggtgcccggcgcgcgcgatgtggcggtcgaattcttcaccctgtcaaaaagctacaacatggccggctggcgtatcggctttatggtggggaataaaacgctggttaacgcgttggcccgcatcaaaagttatcatgactacgggacctttacaccgctgcaggtggcggcgattgccgcgctggaaggcgatcagcaatgcgtgcgcgatattgcggaacaatataaacgtcgtcgtgatgtgctggtgaaagggctgcatgaggcaggctggatggttgagtgcccgaaagcgtcgatgtacgtgtgggccaaaattccgcagccatatgcggcaatgggatcgctggaattcgccaaaaagctgctgcaggaggctaaagtgtgcgtctcgccgggaatcggttttggcgactatggcgatactcatgtgcgtttcgcgttgatcgaaaaccgcgatcgtatccgtcaggctatccgtggcatcaaatccatgttccgcgccgatggactgctaccggcggccagtaaaacggtgactgaacaccacgaataaaaaatgggagccgcctggctcccatttctttgctgcatagcaggttaaatcatcagggcgaaagtaccggcccaaacgatgaccataaaagaaattcccatcaaaaagtatttcacgacatgtcactccgcatttcggcgaaacgcctaaatgaatttaactttaaccgttgtgggactgtcgcagataaaaccagactattctggcggctgcggcagtccgaaattctgtgcgctatttgctccagatggcgctaatgtacgcttaaaaaatggtggaaacaagatccatttttttattaatttttagttacttacgactgtcgtgaataggcgacacattaatttcattcggtaataaattcaattacggcgacggtgatttaaagcaatacccggacatttcgtagttatttgattttgggattttttctattggcggggaggtgcagaaatcatcttctgcaccctgtagcgatgaggttagcgggcggttgtcgtcggcgcgcgccactgatgcggataacgtgcgggcacaaagcgcaaggtaagcgccattaagatgaatacgcagatggcgtggaattcccagtccagctggtagtttccgctcaggctgcgcagcagccccgaaagccatggcgataacccggcgataataaaaccgacgccctgcataaacgccaccagccgagcggcgacggccggctgcggcgaatggtccagcgccagcaccagacaaagcggaaatgcgccgcctagtcctacgccgcaactcactgcccacagcagaggccactgttgcggtagccaaatgaaaccgcagaacccgaacaactgcagcgccaatgccagcatcagcagcttacgacgatcttcgtggcgagcgagcatcggcagcaccagcgcgccggcggtttggccgacggtcatcaatgccagaagcgtgccgctaaactgggcgctgtggccaagctgcatataatagggtggtaaccaggcaatcaggctggcgtagccgccattgatcagaccgaaataaagaccaagcgtccaggcgcggtggtggcgaaagacagccggcgtgacttgcgccgatgcggcagccggcgcggcgggcagcattttgcagagcggcaaccagccaatgatcgcagccagagccggtagagcccaccacgccagcgcgtgatgccagagcgcgctatgctgcgcaagccagggggtgatcgcagcgccaaggccgcccccgcccatcagcgccgccgaccataaccccatcacctgcggcgtgcggtgatgaaagagacgcttaatgacgctgggtataatcgcctgaatcacgccgatgccaatcccgccgagcagcgcgctactaagcagcaggccgctttgcggagccagctcacgcaggattgcgccaatgcctatcgccagcagacttaacgcgatactgcggttttcactaacgtggcggttaacccagcctccggctagcgccagcacccccatcgcgatgaccggaagggcggtcagtagtgaaaccagggtaaagctcatgcctgttgcgtgctgcagttgcggcagtaatggacctatcgaggtcagtagcgggcgcatattaatgccgatcagtaccagcaccaatagcgtcagcgttttgcgttgtgtctggctcattacgctttatccgcccagcgctgatacaaggccagaccttcgggttgtgggcaatggtgaatggggagtgattggttttccaatggctgctgcaattgctggtagatagcggcggtagagagattgaagcgctcgccatcctgattgctgttggcgaaatagacttcgcgcacgccggttaaatacatcgcgctcagacacatcgggcagggttgcccgctggcgtaaaccacgcattcacgcaatacctgattgcccaaatgtagagaaacgtcgcggatggcgttgagttcagcgtgtgcggtaggatcgccgctctggtgcaaggtattcaccgcttcggcaatgacttcgccgtggcgtactatgacggcgccgaacgggcggccgccgttttcaacattagcggcggcaagcgtaatggcgcgctgaagatggttatcatgagtaggcatgagcggctcctgtaaaagtcgggtagaagaacttaatcggcggcaggctggagattgaatcctgcaacagggtagcgagcttacgccataagctaaaagacttatttataattgcgttaatcagattaacttatggattgaggaaatgccctgatgttctaccaggtatatccgacgccgaggatgccatacagttcaccgctgtgctggacaatgggactattggcaatatcatcatcatagcgttcgtagtttgccgctatcattccgacccagtgggggctgaagcggtagctggtaatgatggcgaccattggtgataccgtcgtgccggtatcccattggggacgctcgggcgtcgcctcgcttgctgatatgccgccaaaatagtagttcgccatattatgactccgtaccatcaggcccatccccggcatcaccagcagattgtctttgatgatcggaaaatcagcccatagcagcagctcctggccgttgctgcggccgctgatatctgaactgatgcgcgcgcttatcagcgcgtatggtgtgatccatgtggcgccaataccgccttccagttcgcctttacgttcgttcatccccctaaaagccgtatcgtcgtcgggatctaaattaccgaaacgccagcgtccgtagccgtatagcgcgatagtgtcatcaagatgaaaatagtagcgggcgcggtcgcccagatacattaactggtcgccaaaatataatccgccgggaataaagtgggtttcgttgtcctgcttgtggtagcgcgcggtaccgctaatcgcggcgccgccgagaacccaacctttcggcaccgggctattcgggttatcagcagaaaaaatgtcgatcgagccgaggtcgacctcagcgcgagtggaaccacaatacaaagcaagggtaccgagaacgactacagggcatcgggatagtttcagcatgagctcatagttggcgtgaaatgatgaagtgaatgtgaatcgtctgtgataaacaccagaagatatatagacgatagagcacgtgttggggaatttttttgttttttatcgtactttttttgctttgcttttgatcgagaaagtaaagtgtggcggtatcggtactatcactatggataatggcggattattcgtgtgaataatccgcacaaaagtgagtattatgaattgaggatcagttcagagagtgaagccatcgaatgattttcgttggtgacgatgccttctttttttaacttttccataatggatttaaaggcgagctgtttactgctttctgtcgcattcagtaaatcgcggttaaaggcggggttggattgaataatataattaatgaattcgagtaatagcttattttgtggcggtgttgatggctcattaatggttttttcattatatgaattcatcgcggcctcagaatactctagcggacgactgctgatggtgtgctcgtaaattttctcaatttctttgctggtaatatacagcttgttaagctcaatcgtcggcttatcatcattatcaggaatgaaattgcagtagatgacgtttttagccggggagataatgctcagcgtatcttcttgttgaatgttatctggattctccagcacatccattaaatttcttgaatgagtgtgccataaaccagaaacagaaacgttgagtttaattttggcgatggcgctgtcgtgatcggcatcaatgaccgacacattttcattcagggtgatgatgttgtttattttagagtgctgagaccagggcttgttggctttggtaatgtcatcaaaaccgccgtagccgtatgatgagtcgccaaccccctgattccgggtcagggcgctattgagcgtgccgcgattctttttcagtttcaggcacaggctgatagcgccgatatcgtgccagtgaagtaaatcttccagttcgcactgcaggagtttttgcgcacgagcgatagagcaatactccagtggtgggagattgttcaacttccaaatgtttctttctatcttattcatggcgataattatatgtaaatgtttttaataatctgcgttcctgatgaacagagcgccagcgttgttgttcgactacactatcctttccataaaaaattattcagcagtgaaatataaatccacaatgaagaatctttatgtgacagatggcggcagttaaaacacctaccataatcgattataatatctttttcttaataaggtatagaatattgcttaattaacgataaaaatggggtgagccgtggtgctttattctggtgatggatatactctatattaattatagatgatataaataaaaaagacgccgcagcgccttttttgcaataatcatcgcaggctcaaattagcgagcactcttctgaagagtaaaaccgccatcccccacctgggccgtggcataccacgccattaattcctcggtgcctggcgcgccttcggctggtgcccatggcgcggaatcctgttcggctaccggctgatagcctccgtgcttgacttcaaaaatgataccgccgtgatccagcgacagtaccgcatgccaggtgccggccgccatttccagcgccgtgcattcttctcctaataccacgcggtgggtcacggtgccttgttcatcgaagttcagtactacaaaacggccgcttaacggcagcagcagctcaaaagtatgaggatgacggtgagggcgaatgtaggttcccggctccatggcaatggccagacgctgtaccggatcgctgagttccggatggaagttacgatgcgcccgtaggcggggagcggccgccgcggctgcgctctgttgctgcatatcactgatggtgaattgtttcatctaaaccgcctgcttgaaaaactgataaacgaaggctttcgccgctatctacgactaacgatcgggccttttactggaatacttacagataaagcttagctaaagtagatggtttattgctgattataaaggggttattgaattcggtagacgccaggagaaggtgatatggtgtcccctgcaggaatcgaacctgcaactagcccttaggaggggctcgttatatccatttaactaaggggacaaggcggcgggattatagcgttttttccgccgcccgttaagcgcattgcgattaattgcttaatttgcagccgtttagccctttttatctgcttcggccttcgctttggctttctgttcctgggtcatgtcgttgcgaatctgggcgtggcttagcagggcgaagataaaggtgccgccgcagatgttgccggcgagcgtcggcagcgcgaagggccagatgaactcctgccagggcagggctccgctgaaaatcagatagaaaatttccacactgccgacgacgatatgcgtggtgtccgccagcgcaatcagccaggtcatcaggatgatgacgatgactttcgccgagccggcggccgggaacatccagaccattgtcgccaccagccagccggaaataatcgcgttggcaaacatttcggtcggcgtgttttccatgactttctggctgatgctttgaaacgcctcacgagtggcgtcatcgaaaatcggcatgatattaaacgcccaggcggcgatagccccacccaataaattacctaataacaccacaccccacaggcgcagcaataatgcaatattaccggcgctgggtttatgcataatcggcagcacggcggtgacggtattttccgtaaacagctgctggcgggcgagaatgacaataataaagccgaaggtgtatcccaaattctccagcagataaccgccgggcagggcgccaaggtgaacatgaaaaatccccttggccaccagcgaagcgctaattgataagccggcggcaatcgctgaccacagtagcgccatggcatcgcgctcgagctccttttcaccctcctggcgaatcacctcatgggtggccattgcctgcgaaggcagacgctcctcatccacttctattttctcgccatgttgcttctcttcgctttcaacttctcgttcatcgctatcatgcatactggtgggggtattttgtcgggtcatggctgctctccctttgtatttgttactaagcgtagagagaaatcagcgcggcggcacaggatatgctcctaaattcagcgcaatggcaagaatagcaatacgaatattgcaaaatatgtatagaatcggggagcaacaattatgccaaagaaggctatgctgaaagcagctacccaacgataaaatgctaatgggggcgccgtcccggatgcctccagcgatagtcagaattaacagggagacacctatgaattatcgcctgtcggcgcttgcgcttggcgccacattgctggtgggatgtgccagttccagcactgacgatcggccgcaggggcgttcagatccgcttgaagggtttaaccgtaccatgttcaacttcaactttaatgtggttgatccttatgtactgcgtcccgtcgccgtcgcctggcgtgattatgtgccgcaaccggcgcgtaatggtttaagcaacttcaccagcaaccttgaagagccggcggtaatggtcaactccttcctgcagggcgatccctataaaggcatggtgcatttcacacgcttcttccttaacactattctcgggatgggtggcttaatcgacgtcgcaggtatggcgaacccgcagctgcagcgcgttgaaccgcatcgctttggtagcacgctgggccactacggcgtgggctacggcccgtacgtacagctgccgttctatggtagtttcaccctgcgtgatgagggcggcgacatggccgatggcctgtatccggtactctcctggctgacctggccgatgtccatcggtaaatgggcggtcgaagggattgaaacgcgcgctcagctgctggattccgacggcctgctgcgccagtcttccgatccatacatcctgatgcgtgaagcctacttccagcggcacgactttatcgccaacggcggtaagctgacgccggccgataatccgaacgcgcaggcgattcaggatgagctgaaagatatcgattcgcagtaatccacgcgggtcagaaaagaaaaagggtgaacatgatgttcacccttttttataccgttggcttatcagaagcggtagttgaagttcgcgccgtacagccaggcggtaccttcagaacggaaggtgtaaggaccttctttaatttccacgtgctgaccgtgcatgtaagagacaccaacatccactgaagcatctttattgaacgcgtaggtggtaccggcgctcagccacaggcgatcctgatccgggatagagatggagcgggtgccagccggaatcgggctatcatcgaaggcgataccggtacggaaggtccagttatcgtcatagtaataggtggtacccagcgcgatgcggtaagcatctttaaagccttcatctttatagaacagcgtctggccattgctaccggtggccttcagctcctggaactggctccaactggtgtaggtcaggctatagtgaactgcccactgcggcgcgacgcggttataacccgacagttcccacatctctggcaagttgagggtcagcgagccgttagtggtacggccatcggtaccggccggtaaaccgaagttgccgaggatctggttatacgcggacggcagatcgctcttatagttgccatcaaagtcgattttaacttccgagcggtaggtgaaaccatagcggttgttcttatccagctcatacaggataccggcgttccagccgaaaccccattcgttgccgttcaaatgcgcaatctgagtgtcggcagggatctggctgaccctgcccgccagcgctggcggcagtttaccggaaccggcaacgatttgtcctaaatcacctgcgtagcgttcgattttcgctttcgcgtacaccgcgtcaaaacctaaaccaaagctccagttgctgttcaggcgataggcgccgcttaaattgaagttaacggtggtgagatcggttgtgccgcccatactgccggcagcatagttatcagcaaattcagtcgcgagaccgtagttagaggtgatagatgcgccccaaccaaactgatcgttaattggcgaaacaaagtggaggtttggtacccatgccgttggggcaatattgtctgcattcagacttttaccggtcggcgaagtaccagaaacattaacgtccgggtcgacgaagacggcgcctgccgacattgtcggccggtcaaacatcatgattaacgcggggttacggctggcgttgcccgcatcgtcagcgattgccccttcaccggaataggcacgaccaaggccggaagcggagaattcatttaactggaatcctgctgaccaggcttgggttgaaacaagtgctacagccactgcaagggcagattgggtaaagcgggttttctggctcatgcccataacctcattgagttatttttatttaaactatgttacatgccgtaacagaagcgcgaagtgtagggtctgctttacaacagagaaatcagaccagtggcctgagtataggtctgaccagatgagttgttgcaagtttgtttataagatttttcaagtgtgataacagaaacgcgatccagctggcaaaattgccctgcttcgtcatacccaatttggggcatttttgttttggatcatttttaagtgtgatttctgtcacttaagcgttttcctgccattaacaactggaggggggacgagggcgggcgtaaaataggcgcattatttgtctggcaccgaaggtgcatatacagaggaaatctacgatgagtaaatgtagcgctgatgaaaccccggtttgctgctgtatggatgttggcaccattgtggacaacaccgactgcaccgcctcctacagccgtgtgtttgcaaaccgcgctgaagcggaagcaaccctcgccgcgctgagcgaaaaagcccgcaatgtggaatctgaaccgtgcaaaattaactcgacgttcaccgacgttgagggcggcgtgcagttgaatatcgattttgtttttagctgtgaagcggaatcgctgatcttccagctggggttacgttaatcctctctcttaacgcctctttcctgaggcgttatcttttctattcaatgtgttttggctcccactttttctcttccccgattggcttaatgtaaaaaattagttaagactagttatcaggtcagaccacttggttttatcggttaacaggggagagttatgagtcaggcattaccgcttatcacccgtcagggcgatcgcattgccattgtcagcggtttacgtaccccatttgcccgtcaggcgacggcgtatcacggcgttccggccgtagatctgggtaaaatggtcgtcggcgaaatgctggcgcgcagtgaagttcccccggaagtgattgaacagctggtcttcggccaggttgtacagatgccggaagcgccgaatattgctcgtgaaatcgtgctcggtaccggcatgaatgtgcataccgacgcctatagcgtcagccgcgcctgcgccaccagtttccaggcggtagctaatattgccgaaagcctgatggccggcacgatccgcgcgggcatcgccggcggcgctgattcctcctccgttctccccatcggcgtgagtaaaaaactggcccgcaccctggtggatgtcaataaagcgcgcacccttggccaacggctaaaactcttttcccgcctgcgcctgcgcgatcttttaccggtgccgcctgctgtcgcggaatactcaaccggcctgcggatgggcgacaccgctgagcagatggcgaaaacctggggcattagccgtgaagatcaggacgcgttggcgctgcgttcacaccagcttgccgcccgcgcctgggaagagggcaaactggccagtgaagtgatgacggcctatgtaccgccttatcgcgagccgctggagcaagataacaatattcgtaaaaattcaaccctggcggattaccaaaagttacgtccggcgttcgatcgtaaacacggtagcgtcacggcggcaaacagtacgccgctcaccgacggcgccgccgcggtgatcatgatgaccgaatcccgggccaaagagttggggttaacgccgctgggctacctgcgtagctatgctttcaccgctattgatgtctggcaggatatgttgctggggccggcgtgggcgacgccgctggcgttggatagggcgggaattacccttgcagacctcacgttgattgatatgcatgaagctttcgccgcgcagacgctggcgaatctacaatgtttagccagtaatcgtttcgcccgggaagtgctgggccgttcacaggcaaccggggaagtcgatgccagcaagttcaacgtgctgggcggctctatcgcctacggacacccctttgcggcgaccggcgcgcgcatgattacccagactttgcatgaactccggcgacgcggcggcggatttggtctggttaccgcctgcgcggcgggaggtttaggttccgctatggttctggaggctgaataatggaagctgtaacagcttttacgcttgaaattcgcccggataacatcgccgttattaccatcgacgcgcccggcgaaaagataaataccctgaaagccgagttcggcggcgaggtgcggacgattatccgccagctccgcgaaaataaggcgctgcgcggcgccgtatttatctccgctaaacccgataactttatcgccggcgcggatatcaacatgattgctcgttgtaccagcgccgcagaagccgaagcgctggcgcgccagggccagcagatcatgtccgagatccacgcgctttctatcccggtgattgccgccattcacggcgcctgccttggcggcggcctggagctggcgctggcctgtcatgggcgagtctgtagcgacgatgataaaacgcggttgggattgccggaagtgcaattggggttgctaccgggctccggcggcactcaacgcctgccgcggctgattggcgtcagtacggcgctggaaatgatcctcaccggtaaacaattgcgtccgcgtcaggcgttgaaagccgggctggtggatgatgttgtcccgcaatcaatattgctgcggaccgcggttgagctggcgctacagggccggccggcgagccgaactgtaccggtgcgcgaacgggtacttgccgggcctctggggcgtcagctgctgttccgcatggtggcgaaaaagacccagcaaaaaacgcagggtaattacccggcggcagaacgtattttacaggtgatagaaaacggactggcgcacggctgcagcagcggttacgccgaagaggcgcgagcgtttggcgaactggcgatgacgccgcaatcgcaagcgttacgttctattttctttgccagcaccgatctgaaaaaagatcgtggcgccgaagctgaccccgctgcgctgaatagcattgctgtactcggcggcggcttaatggggggcggtattgcttacgtcaccgcctgtaaaggcggcctgccggtacgcataaaagacattcaggcgaaaggcatcaatcatgcgctcaagtacagttgggatctgctggataagcaggtgcgtcgccgctatctgcgcgccagtgaacgcgatcgtcagctggcgctgatttccggcgctacggattatcatggctttgcccatcgcgatgtggtcatcgaagcggtgtttgaggatctggcgctgaagcagcggatggttggcgagatcgaacaatgctgcgggccgcagacgatctttgcctccaatacctcatcgctaccgatcggcgagatcgccgctcaggccgcacggcctgagaaggtaattggtctgcactttttcagcccggtcgaaaaaatgccgctggttgaggttatcccgcatgcaacgaccgatgagcaaaccatcgccacggtggtgaagctggcgaagctgcaggggaaaacgccgatcgtggttgccgaccgtgccggtttttatgttaaccgtattctggcgccctatatcaatgaagccatgcgcctgctgctggagggcgagccggttgaacatattgataatgcgttggttaaatttggtttcccggttggacctattcagttgctggatgaagtcggcattgataccggcactaagattatcccggtactggagaccgcttttggtgaacgttttagcccgcctgcaaacatcattgacgcgattttgaaggatgatcgcaaaggcagaaaaaataatcgcggtttctatctttatgagacaaaaaggcgtaaaagcaaaaaacgggctgacccggctatttacccattattggcagtagcaagtccgcgggcgcgtttgtctgctcagcaggtcgctgaacgctgcgtgatgatgatgctcaacgaggcggcgcgctgttttgatgaacagatcgtacgtagcgcgcgtgatggcgatattggcgccgtctttggcataggttttccgccgtttctcagcggcccgttccgctatatggatagcctcggcgcgggtgaagtcgccgcaatcttgcagcgtctggccgcacagtacggccctcgtttttctccgtgcgacaccttattgcgcatggccgagcagggggcgaccttttggcccactggtgaacggacgacctaagttatggtcaaaagaaggtaaatccaacgttggctggcgctgttgattggcggttttgtaaacaaatattgactatacttacgccattgaggtaaaaaacagcgtttcattcgttggatggatcaggcacaatgcccggccaccgggtcgcctgcgtattgtttacgcagagcgagttgcggtgattctggttaacaaaagcggtgcaatatgcaagtttttatcatgcgtcacggcgacgctgccctcgatgcagccagtgactccgttcgtccattaaccgtttgcggttgtgacgaatctcgtcagatggcaacctggctgaaaggtcaaaaagtggatattgagcgggtgcttgtcagcccttacctgcgtgcagagcaaactctcgacgtggtaggggagtgcatgaacctgccgaaagatgtcgacgtgatgccggaactcacgccgtgcggcgatgtagggatggttagcgcttatcttcaggcgctggcgaatgagggcgtgaaaacggcgctggtcgtttcacacctgccgttggtggggtacctcgtctcagagctgtgcccgggggaaacgcccccgatgtttactacctcagcgattgcctgcgtcaccctcgacgccgacggcaagggcgaattcaactggcagatgagcccctgcaatttgagaatggcgaaagccatctaaggctttccaccctcggagcttccgcttacggaagctccggcggcaaccactcttcaacttcaatcagtaccaatagcgcggcatcgccgccgtactcttttggtgcctgatggaacgccataatatgcggatgttgcgccagccacagcggcgtttgctgcttgaggatgtgtttgccgtgtccgtgcatcacgcaggcgcagaagatatgttcgcggcggcaggcggcaatcagcgcgcccaattcttgttttgcctgcatctgggttaggccatgtagatcgagaaacagctccggcgaatagtcgccgcggcgcagctttttcagctcaaaatggctgacatccgcgcgcacgtacttcatcgcgccttccgtattgagcaacggctgaaattcgtcggaaaaatagtggctgttatccacctgttcctgcagcaatcgcttaggcggtacctcgctgagcttcttgcgctgcgggcggtgtacgatggtgtcctgtttaatttgccgggtgccggtcattagctggcggaatagcgcctgatcctccgcgcttagcggtgttttctttttcattgcccaatctcactatttcttttcgttagtttacccgactcgcccgcgcttcaggcaaggaaaacctatttttccccactccggctgcgcaagaatgctgatttatcgccgccgtcgtggcaaactagccgccgaatttatagcagagcgtgccctggaggattgcgtggataaaatttttgttgatgaagcggtcaatgagctgcagaccattcaggacatgctgcgttgggcggtaagtcgttttagcgccgccaacatctggtacggtcatggcaccgataacccgtgggatgaggccgtacagctggtattaccctcgctgtacctgccgttagatataccggaagatatgcgcaccgcgcgcctgacctccagcgaaaaacatcgtatcgtcgagcgcgtgattcgccgcgtcaacgaacgcatacccgtcgcttacctgaccaacaaagcatggttctgcggccatgaattctatgtcgatgagcgcgtgctggtaccgcgctcgccgattggcgaactgatcaataaccagttctccgggctgataaatcacaaaccgcagcatattctcgatatgtgtaccggtagcgcctgtattgccatcgcctgcgcctatgccttcccggaagcggaagtcgacgctgtcgatatctccccggacgcgctggccgttgccgaacataacgttgaagaacatggcctgattaaccaggttaccccgatccgctccgatctgttccgcgatctgccgaagctgcagtacgatctgatcgtgaccaatccgccgtacgttgatgaagaagatatggccgatctgcccgatgaatatgagcatgagccggttctgggtctggcttccggtagcgatggcctgaagctaacgcgccgcattcttggctgcgcgccggattacctcaacgacgacggtattctgatttgtgaagtcggtaacagcatggtacatctgatggagcagtacccggacgtgccgttcacctggcttgagtttgataacggcggtgatggcgtctttatgctgactaaacagcagctcattgacgcgcgtgcgcatttcggcatttataaagactaaaaaacaacacgcaaacataacgaaaagaatggagccgtgatggcaggaaatacaattggacaactctttcgcgtcaccaccttcggcgaatcgcacggcctggcgctgggttgcatcgtcgacggggtgccgccaggcattccgctgaccgaagctgacctgcagcacgatctggatcgccgtcgccctgggacatcgcgttacaccacccagcgccgcgaaccggaccaggtgaaaatcctttccggcgtcttcgaaggcgtgaccaccggcaccagtattggcctgttgattgaaaacaccgatcagcgttcccaggactacggcgcgattaaagatctgttccgcccgggtcatgcggattacacctacgagcagaaatacggcctgcgcgactatcgcggcggcggccgttcgtctgcgcgtgaaaccgcgatgcgcgtggcggccggggcgattgccaaaaaattcctcgcggctaaatttggtattgtgatccgcggttgcctgacgcagatgggcgatattccgctggccatcaaagactgggatcaggttgagcagaacccgttcttctgcccggatccggataaaatcgacgcgctggatgaactgatgcgcggcctgaaaaaagagggcgactcgattggcgcgaaagtgaccgtcgtggctgacggcgttcctccgggcctcggcgagccggtgttcgaccgcctggatgccgatatcgcccacgcgctgatgagcatcaacgcggtgaaaggggtagaaatcggcgatggttttgaggtggtcaaactgcgcggcagcgaaaaccgcgacgaaatcaccaaagccggcttccagagtaaccacgccggcggcattcttggcggtatcagcagcggccagcaaatagttgctaacatcgcgctgaaacccacctccagtattaccgttcccggtcatacgattaaccgcttcggcgaagaagtcgaaatgatcaccaaagggcgtcacgatccgtgcgtcggcattcgcgcggttccgatcgccgaggccatgctggctatcgtgttaatggatcactttatgcgtcaacgcgcgcagaatggcgacgtgacaacatcaattccacgctggtaaccgatgaaaaataccgttatcgcactgctggcgcttttggccagcaccgccagcctggcggcgacgccgtggcagaaaatatcccagccgattagcggcagcgcccagtctattggcgcgtttgccaatggctgcatcgtcggcgcccagccgctaccgctgaactcccctgattaccaggtgatgcgtaccgatcagcgtcgctatttcggccatccggttctcgtgcagtttattcagcggctgagtttgcaggcgcacaataaaggtatggggacggtgctgattggcgatatgggcatgcctgccggcgggcgctttaacggcggccacgctagccatcagtcgggtctggatgttgatattttcctgcaattgccgcagacccgttggacctccgcgcaactgctgaaaccacaggcgctggatttagtcgcccgtgatggcaagcgggtggtgccgtcactgtggagcccgcaaatcagtaacctgattaaaatggcggcggaagataatgatgtgacgcgtattttcgtcaacccggctatcaaacagcaattgtgtctcgatgctggtaacgatcgccaatggctacgcaaagttcgcccgtggttccagcatcgcgcccacatgcacgtgcgcctgcgctgcccggcgggcagcctcgagtgcgaagatcaagcgccgccgccggctggcgatggctgcggagccgagctgcaaagctggtttgaaccgcctaaacctgggtcaaccccacctgtgaagaagacgccgcctccgctgccgccttcctgccaggcgctactggatgagcatcttctctaatggatagttttgtcgaactgtttatggtgtcgccaatggttttggtggcgctctttttcgtcgcgattctggccggatttattgattccttagctggcggcggcgggttgttaaccgtcccggcgctgatggcggcgggtatgccgcccgctcaggcattggcgaccaacaagctacaggcctgcggcggttccatttccgcgacgctctactttatccgtcgcaaggtggtaaatcttgccgatcagaaactcaatattctgatgacgtttatcggctcgacggcgggggcgctgctggtgcagcacgtgcagtccgatattttgaagcaaatcctgccgctgctggtgatcggcattgggctgtactttttgctgatgcctaagcttggcgaatccgatcgtcagcgtcgcctgtatggtttgccgttcgcgctggtcgctggcggcagcgtgggtttctacgacggtttttttggccccggcgccggttctttttatgcgctggcctttgtgacgctcgccgggtttaatctcgcgaaatccaccgctcacgccaaactgctaaacgctacctccaatattggcggcctgctgctgtttatcattggcggcaaagtgatttgggctaccggttttgtgatgatggccggacagtttatcggcgctcgcgccggttcgcggctggtgctgagtaaagggcagtcgctgattcggccgatgatcgtcatcgtctccgcggtgatgagcgctaaacttctttacgacagccacggggctgagattttgcagtggttgggaattcactaatgcaacagcaacaccattatcagcagttagtcgagatcttcgacaagtgcttcgccgatgattttaatacccgtctgattaaaggcgacgacgaaccgatctatcttcctgcagatagcgaagtgccctataaccggattgtgtttgctcacggcttttacgccagcgcgctgcacgaaatttcccattggtgtatcgccggcaaggcgcggcgcgagcaggtagattttggttactggtactgcccggacggccgcgatgcgatgacgcaaagcaagttcgaagacgtcgaggtcaagccacaggcttttgactggttgttctgcacggcggcgggatttccgtttaacgtcagctgtgacaacctcgaaggcgactttgagcctgaccgcatcgcctttcaacggcgcgtacatgcccaggtgatgacctatctggagcaagggatccctgagcgaccggcacgctttattcgcgcgctgcaacagtattatcaaacgccgccgctgacggcagaacaatttccgtggccggaagacctgcactaaagccacgttctacaaatgaaagaggaaagacgatgatcgcggagtttgaatcacgcattctggcgttaattgacgatatggtagaccacgccagtgatgacgaactgtttgctggcggttatctgcgcggccacctgacgctggcggtggctgagctggaaggggaaggggaacatacggcgcaggcgattaatgataaagtcgccagcagcctggaaaaggccatcagcgcgggcgaactatcgccgccggatcagattctggtgcaagggatgtggaataacctgtaccagcaggcgaaaaatcaggcctgataaatggtgtcatccggatgaggcgttagcccacatccggaaactctccccggtcgcgctgcgcctaccggggcgactaaacccaggtcgggataaggcgcaagtcggcgttattttaccgcttttcccttcagcagttttcttacccacagtcgattcggattcagcgccgcgagggtttcgctatccagcggtagcggttcttcactcatctgcgcggccagcagttcggcgctcaatggcgcggtgcacaacccacgagatcccaatgccgcgagcataaacagattgtgatagaccggcgcgctgccgacattttcctgctgttggtgaagcgtggcgtactgcgtcaacgttttctcataatccggaacgttgcccaccatcggcaggtgatcgcgggtagcgcagcgtacgccgcagcgggcttcgttgccgctaacatccacctcttttgcccatgccgcctgcgggaaacaatcaatcaggcgctggcgattttgccactgatcttcggcgctgaaatcggtatccgtcttgccgcgatgatagctggcgccgatacagtgttgctgattcttgggattttgcggcgtcagatagccgtcataacataacacctggcgcagggcggaaagccccagcgtggtggggatatggctgacctggccgccgaccggataagccggtaactgcccggtctgggcaaaatcagtcaggcgatgtccgttcgccagtactaccgcctgatgacgatgctgctgattgagcaaccagccgtcgccctccgcgctgagcgtttcgacgggataaccgtagtggctgcgtaatccctgtgtcgccgccagcgccagcaattctgccgtcaactgctgcgggcacagccagccgccggccggataggtgataccgccgcagccggtatcgacgccggtcagttcagcaacctgctccgccgtcaccgcgcaggcgatctcggccggtaaatctgaagccagcatttgggcgattttctgcgtgcttttttcatcccaggcgagttgggttacgccgcaccattgatgatcaaattccactggcagggcgtcgtagaggcggcgcgcgaaagtaaacgccgccgggaaaaagcgcgccagcgaagggtcgtgctggcttaatagcggatacagcgcgccctgacgattgccggatgcgccgctggcgggcgcatcgtcagcgcagtacaacgtcacctgccagccgcgacgcagcagcgccagcgagagcagtgcgctggcgataccgccgccgatcaccgccgcttcgcgcgattgactaccgctgcgggcaaaccatggcgtccgcgcgaatgtcggaacgtcggcggtcaattcaccgattagcatttcgcgcttgcgaccaaagcctttgcgtttttgcatgctaaagccggcctcctgcagcccgcggcgaacgaagccagcggaggtgaaggtcgccagcgtgccgccggggcgggccagacgcgccatggcggaaaacagccccggcgtccacatatccgggtttttcgccggcgcgaagccgtcgaggaaccaggcgtcgacctggcggttgagtgaatcgtcaagctggtcggtgagcgtgttgatatcgccaaaccataaatccagcgtgacgcggccatcgtcgagcagcaggcggtggcagcccgcgattggcaatggccactgcgcctgtagctgttcagcccatggcgccagttccggccagtgctggtgcgccaggcgcaggtcatcggccttcaggggaaatttttcaaaactgatgaaatgtaatctttgcagcgtagcctgcggattatcgcgacgaaaaacagcaaacgcctgccacagcgtcaggaaattgagcccggtgccgaagccgctctccgcgacgataaatagcgggcgcgggtgggttggaaaacggctatcaagctggttgccgttgagaaaaacgtagcgcgtctcttccagaccgttgtcattagaaaaataaacgtcgtcaaaatctcgggaaacaggtgtaccctcagcgttgaattccaggttggcgggttgtatggcgttttgtttcacgtaagttactcgaatcacaaggcgtagcgcgatcttaacgatgtgtgccagaaggcgcaaatttatacacaaaatggctgatcggacttgttcggcgtacaagtgtacgctattgtgcgactcgaaacttaaaatagtgcgacttacagaggtattgaatgaaacgtgcagtgattactggcttgggcatcgtttccagcatcggtaataaccagcaggaagtcctggcatctctgcgtgaaggacgttcagggatcactttctctcaggagctgaaggattcaggaatgcgtagccacgtatggggcaacgtcaaactggataccacgggcctcattgaccgcaaagtagttcgctttatgagcgatgcatctatctatgcttatctgtccatggagcaggcggtagccgacgccggtctggcgccggaagcataccagaacaacccgcgtgtcggcctgattgcaggttccggcggcggctccccgaaattccaggtcttcggcgccgatgccatgcgtagcccgcgtggtctgaaagccgtgggcccatacgttgtgactaaagcgatggcttccggcgtatctgcctgcctcgccacgccgtttaaaatccacggcgtcaactactctatcagctccgcttgcgccacttccgcacactgcatcggtaacgcggtagaacagattcagctgggcaaacaggacatcgtctttgccggcggcggcgaagagctgtgctgggaaatggcttgtgaattcgacgccatgggcgcgctgtccactaaatacaacgattctccggacaaagcgtcccgtacctatgatgcgaaccgcgacggtttcgttatcgcgggcggcggcggcatggtcgtggtggaagagctggaacacgcgctggcgcgcggcgcacatatttatgcggagatcgtcggttacggtgcgacttccgatggcgcggacatggttgctccatctggcgaaggcgcagtgcgctgcatgcagatggcgatgcacggcgttgataccccgatcgactacctgaactcccacggcacttctactccggtaggcgacgtgaaagagctgggcgctatccgcgaagtcttcggcgacaacagcccggctatctccgccaccaaagcgatgaccggccactctctgggcgccgcaggcgtacaggaagccatctactctctgctgatgctggagcacggttttatcgcgccaagcatcaacatcgaagagatggacgagcaggctgccggccttaacatcgtcaccaaaccgaccgatgctcagttgaccaccgtgatgtccaacagcttcggcttcggcggcaccaacgcgaccctggttatgcgtaaatacagcgcctaattggttagagtcagtaccaggggagcccgaggctcccctttttttgacgtcttgacagcgcctggcgagagcaggcaaattgctcgccatcattcccattccatcttctcgccttgctctgcaaaactggggtaacgcatgtccgcagcgacaaaaacgataaacaacgcttcagagaatctctcgctatttcgcattacctttgcggtttttctgacctatatgaccgtggggttgccgctaccggttatcccgctatttgtgcaccacgatctcggctttggcaacacactcgtcggcgtggccgtcggcatccagtttctcgccacggtattaacccgcggctatgccgggaggctggccgatcagtacggcgcgaaacgctcggtgctgcaaggaatgttggcctgtgctctggccggctgcgcctggctggcggcggcgctgctgccggtgccggtaatggccaaatttggcctgctggtgctgggacgtttgattctcggctttggtgaaagccaactgctgaccggcaacttaagctggggattagggctggttggcccgcggcgttccggtaaagtgatgtcgtggaacggcatggcgatgtacggggcgctggcggtgggcgcgccgctggggctgctgatttacagccgcttcggcgtggcggcgttggcctgcgttacgatggcgctgccgctgctggcgtgggcgattaacggtacggtccgtaaagttcccgcccacggcggcgagcgtccttcgctatggagcgtcatcggcatgatctggcggccgggaattggtctcggcctgcagggcgtcggctttgcggtgatcggtacctttgtttcactctatttcgccagccacggctgggcgatggccggcttcacgttgaccgcgtttggcggcgcttttgtcctgatgcgtattctgttcggctggatgccggatcgctttggcggcattaaggtggcgatggtatcactgctgattgaagcgattggtctgacgctgctatggcaagcgccgggcgcctgggtggcgctggcgggcgccgctttgaccggctgcggttgctcgctcatcttcccggcgctgggcgttgaggtagtcaaacgggttccggcccaggttcgcggcaccgcgcttggcggctatgccgcgtttcaggatatctcttacggcgtcactggcccgctggctggcctgcttgccacctcgcttggctatgcttccgtgttccttgccggggcgatttgcgcggtattgggcattggtgtcactttactgacgctgcgtaagtaatggcatcatggcggcgttctggccgccatgattgtttttagcttacagcaccagccacagcagaataatcaccaccagcagggcaatcgccaccgtccacgcttttttgctatacaccgcatggggggcgggcagcggctcgaccggagtaattgccattgtcgcctgggcgcgggccacgcgtagcgcaaagaccttatttaatagcgttagcacctgcgggctggttaaggtcgtcgtgggcgtcacctgccagctgctttgcgcgaaatcggcgattttctgccactcctgcgcctccagcggttgcttgagcgctgcctgcagcgaattcatcgtcggcgcggtttgcgcgctcagcgtttgtcgcgcctgcagccagtacgagagcggggtgaagtgggtggcggggatcagttcgccggatttcacgccgcacagctcaagcattgattgccagataagcttgctcgattcgccggttgcggcggccagtttggtcactagttgattcagggtgttatgttccgccggcagcaaagggcgcagcgtcggcgtacgctgctgcggctgcgggatcgccaactgaccgttttgcagcagatgcagcacgttctccagctgcgcctgggtcagcgcatgcagcacggtttgaccgtaattctggcggatataatcgctcaccgcctgacggttatttccctgagtcagcagttcgctgagctgggcgagaatttgccgatggtggtggttttgctgagcgatacttaagcgctgattcaggttgctctcagccgcgctgaaatggctcgccagcagcggcgtgtcgcctttcagacccagatcgtgcttcacgcaggcccacacttcggcgttttgctgcgatgtcagcgtcaccagacgcgttatcagccgctccagaacggtgcgttgctgcatggtgagcgcgtttgggcccacggcggatgcgccggatgggccagtccccggagggcgatcggacatacctgaaacgggtggtgtcatgatgaatccttaccgtagtgctgtacttaagccgggtgatgatgttcctggcggccagattatggcacacttccccggtttactctcgttctcagacaggtactgaaccgtgaaaatcctcgttgatgaaaatatgccctatgcgcgtgagctttttagccgtttgggagacgtgcaggccgttcccggtcgtcccattccgcaggaagcgttaaccgacgccgacgcgctgatggtgcgttccgtcactaaggtgaatgaagcgctgctctccggtaaggcaattaagtttgtcggcaccgccaccgcaggcaccgatcatgtcgatcaagcgtggttacagcaggcggggattggcttttccgccgcgccgggctgtaatgcgatcgcggtggtggagtatgttttctcggcgctgctgatgctcgccgagcgcgacggattcgcgctggctgatcgtaccgtcggtatcgtcggcgtcggcaacgttggcgggcgtttgcaaaaacgtctggaagcgctgggaattaaaacattactctgcgatccgccgcgcgccgatcgtggcgatgaaggcgacttccgcagcctggacgagctggtgcagcaggcggatgtcctgactttccacacgccgttgtttaaagacgggccgtataaaacgctgcatctggccgatgaagcgctgattagccgcctgcagccgggggcgatcctgattaacgcctgccgtggcccggtggtggataacgcggcgctgctcaagcgcttgcaggccgggcagcagctgagcgtggtgcttgacgtctgggaacccgaaccggatctgaataccgagttgctggcgcgtgtcgatatcggtacctcgcatatcgccggttatacccttgaaggcaaagcgcgcggcaccacccaggtttttgaagcctatagcgcgtttattggccattcgcagcaggtggcgctggatacgctactgccggcgccggaatttggccgcatcactctgcacggcccactcgatcaggcgacgctgaaaaggctggtccatttggtgtatgatgtgcgccgcgatgatgcgccgctgcgtaaagtggcaggcattgccggcgaattcgacaagctgcgcaaaaattatcaggaacgccgcgaatggtcttccctgtacgtacagtgcagcgatgaaaaagcagcgacgctgctgcgtcagctcggttttaatgccgtacatcatcctgttcgttaatatcttcttaatgcccctgtcggataatccggcagggtcgctattttctggagtacaccaccatgtctgaaggctggaatattgccgtactgggcgcaaccggcgccgtaggcgaagccctgcttgaaacccttgctgaacgccagtttccggtaggcgaaatttatgcgctggcgcgcaatgaaagcgcgggcgaacatctgcgttatggtggcaaatcggtcatcgtgcaggacgccgccgactttgactggacccaggcccagttggctttcttcgccgcgggcgtcgaagccagcgcggcgtatgtcgaagaagccaccaacgccggttgtctggttatcgatcttagcggcctgtttgcgctggagccggacgtgccgctggtggtgccggacgtcaacccgttcgtgctcggcgactaccgcaaccgtaacgtgatcgcggtaccaaacagcctgaccagccaactgctgacggcgctgaagccgctgatcgatgatggcggcctgtcgcgtattaccgttaccaacctgctgtctgcctcggcgcaggggaaaaaagcggtcgatgcgctggcggggcagagcgcgaaactgctgaacggtattccgattgatgaagacgatttctttgggcgccagctggctttcaacatgctgccgatcctgccggatcgcgaaggtagcgtgcgcgaagaacgacgtatcgtcgatgaagcgcgcaaaattctccaggatgacggcctgatgatttccgcgagcgtcgtgcaatcgccggtcttctatggccatgcgcagatggtgaattttgaagcgctgcgtccgctggcggcggaggaggcgcgcgacgcctttacccgcggcgaggatatcgagctttccgaagagggcgaattcccgacgcaggtcggcgatgcttccggaaatgcgcgtctgtctatcggttgcgtgcataacgattatggcatgcccgagcaaattcagttctggtcggtggccgataacgtccgctttggcggcgcgctgatggcggtgaaaatcgccgagaagctggttcaggagtatttgtactgatgtctgaaccacagcagcagccggtgtataaaatcgcgctgggcatcgagtacgacggcagcaaatactacggctggcagcggcaaaacgaagtgcgcagcgtgcaggaaaagctggaaaaggcgctgtcgcaggtggcggccgaaccggtacacgtattctgcgccgggcgtaccgacgccggcgtacacggtaccggccaggtggtgcactttgaaacccgcgctcagcgtaaagacgccgcgtggacgctgggcgtaaatgcgaatttacctggtgacatcgccgtgcgttgggtgaagcatgttgcggacgattttcacgcccgcttcagcgcgacggcccgtcgttaccgctacgtcatctataatcaccgcctgcgcccggcggtgttaagtcagggggtgacgcattattaccaccctctggatgccgggcggatgcatcgcgccgcgcagtgtttaattggcgagaatgacttcacctcgtttcgcgcggtgcaatgtcagtcgcgcacgccgtggcgcaacgtgatgcatatcaacgtgacccgtcacggggcttatgtggtggtggatatcaaagcgaacgcttttgttcatcatatggtaaggaacatcgtcggcagcctgatggaagtaggcgccggaaaccagccagagagctggattgcagaactgctggcggcgaaggaccggactctggctgccgcgacggcgaaagcggaaggattgtatctggtgtcggtggattatccggcccatttcgacctgccggtgatgccgatgggcccgctgtttttggcggactaatatcagcgcccccgtaacagggggcggttgtcactaaaggctaagacaaatatggacctgattcattttttgattgatttcatcctgcatattgatgtgcaccttgcggagctggtcgcacagtatggcgtctgggtttacgccatcctgttcttgattctgttctgcgaaaccggcctggtggtgacgccgttcctgcccggagattctctgctgttcgtcgccggcgcgctctccgcgctgccaactaacgatctcaacgtacacctgatggttgcgctgatggttattgccgccgttgttggcgatgccctgaactacaccatcggtagattgttcggcgaaaagctgttcagcaatccgaactcgaagattttccgtcgcagctatctcgacaaaacccataccttctatgaacgccacggcggcaagactatcatcctggctcgctttgtgccgatcgtcagaacctttgcgccgtttgtggcgggaatgggtcacatgtcctatcgtcattttgcggcgtacaacgtggttggcgcgctgctgtgggtactgctgttcacctacgcagggtacctgttcggtgatttaccgatcgtgcaggaaaacctgaagctgctgatcgtggcgattatcgtcctgtcggtactgcctggcgttatcgaagtgattcgccaccgccgggcggcggcaaagcaggctaaataagcccttagcggcattctcgccgggcgttgctatgacgtccggcgcgcaaagtgtgagcggttcgaccacttttttatcccatgttacgggatgttatgatttaatgtgcaacattcatggtctgtgaggggcaaaagtggcattatgcgccccttgcgacaaaactggcatcgaccaggttcaggtagaaaggttatcaatgagctggattgaacgaattaaaagcaatataacccccacccgtaaggcaagtattcctgaaggtgtatggaccaagtgcgacagctgcggtcaggtactgtaccgcgcagagctggagcgcaacctggaggtttgccctaagtgcgatcaccacatgcgtatgtcggcgcgcaaccgcctgcatagcctgctggacgaaggttctctcgtggaactgggtagcgagctcgagccaaaggatgtgctgaagttccgcgattcgaaaaagtataaagaccgtctggcctctgcacagaaagagaccggcgagaaagacgcgctggtggtgatgaaaggcaccctgcacggcatgcctgtcgtggcggcggcatttgaattcgcctttatgggcggttcgatgggttccgttgttggcgcgcgtttcgtccgtgcggttgagcaggcgctggaagacaactgcccgctgatctgcttctccgcctccggcggcgcccgtatgcaggaagcgctaatgtcgctgatgcagatggcgaagacctccgcggcgctggcgaaaatgcaggagcgcggtttaccgtacatctccgtgctgaccgacccgactatgggcggcgtctccgcgagcttcgcaatgctgggcgatctgaatatcgccgagccaaaagcgctgatcggcttcgccggtcctcgcgttatcgagcagaccgtgcgtgagaagctgccgccgggattccagcgcagtgagttcctgattgaaaaaggggcgatcgacatgattatccgtcgtcctgaaatgcgtctgaaattagccagcattctggcgaaactgatgaaccttccttcgccgcaggccgatgcgcctcacgagggcgaggtggtaccaccggtaccggatcaggaaccagaggcctgataatgcagagggcagggccgacaggcgctgcccttttttttaccgttaactctcgcggacatcatggaaaaagatcctattcctcaggccacgtcgcccctggctacgtggctttcttatctggagcatctgcacagtaaagccatcgatctgggactggcgcgggtgagcgaagtcgccggacggatggcgatattaaaaccggcgccgtttgtctttacagtagcgggtaccaacggcaaaggcaccacctgccgaacgctggaatcggtgctgatggcggcgggctataaagttggcgtgtatagttcgccgcatctggtgcgctataccgaacgcgtgcgtatccagggcgccgagctgccggaagcggcgcataccgcctcatttgccgaaatcgaagcggcgcgcggcgatatctcgctgagctattttgaatttggcacgctgtccgcgctatggctgtttaagcaggcgcagctggatgtggttatcctggaggtgggcctcggtggacgcctggacgccacgaatatcgtcgatgccgacgtcgcggtggtcaccagcatcgcgctggatcataccgactggctggggccggatcgtgaaagcattggccgtgaaaaagcgggtatcttccgcgctggtaaaccggcggtggtgggcgagcccgatatgccgcagacgattgccgacgtggcgaatgaaaagggcgcgatgctgctgcgccgcgaccatgactggcgttatagcgtgacagaccagtcatggaactttaccgatggtcagggcgagttggcagggctgccgctgccgcaggttccattgcccaacgccgcgacggcgctggcggcgctgcgcgccagcgggcttaacgtcgctgaacaggcgctgcgcgacggcattcatcacgccatgctcccggggcgctttcagattatcagcgacgcgccgcgggtgatcctcgatgtcgcgcataacccgcacgcggcggcttatctcgccgggcgtctcaaaagcttagcgaaaacggggcgcgtactggcggttattggtatgctgcatgataaagatatcgccggaaccctggcgaatctggcgcctgaagtagacgcgtggtactgcgcgccgctggaagggccgcgcggcgccacggcggaccagctgattgcgcatctgcgcgcgggccaacgttatgacagcgtagcgcaggcgtggcatgccgctatggcggatgccaaagccgaagatacggtgctggtgtgtggttccttccacacggtggcgcatgtaatggaagagatagacgcggggagaatcggtggcgagtaagtttcagaaccgtttagtcgggacgattgtactggtagcgctgggggtaattattctcccgggtctgctcgatggccagaaaaaacattatcaggatgagtttgcggcgatcccgttggtgccgaagccgggcgatcgcgatgagccggatatgctgccggcggctactcaggcgctgccttcgcagccgccggaaggcgccgcggaagaggtgagagcgggagacgccgcggcgccatcgctggatccttcgcgcgtcccggtaaacaacaatagcttcgatgaagtccaggagccggtggtggccgccaagccgcagccgaaaccacagccgaagccggttgagaaaccgcagcctcagcaggttgcgcagacgccgcctccggccaaaacgcaaccgcagccgcaacagcagcaggccgcgattccggcgccgaccgggaaagcctatgtagtgcagttgggggcgttgaagaatgccgataaggttaacgaaatcgtcggtaagctgcgttcctcgggctttaaagcctggacatcgccatccacgccggttcagggtaaaattacccgtattctggtggggccggatgcgtcgaaagacaagctgaaggggcaactcggcgagctgcagcagatttctggtctgagcggcgtggttatgggatatagcccgaattaaaatcccacccgctctgattgggcgagctggcaggcgggttaacctgctgaaacccttgccggatacgctctgaagaggcgtcaggcagtatggcgttgaatgttttttcagcgccatttttatttctgtagggcacggaaatccctacgcaaacgttttctttttctgttagaatgcgccccgaaccggacgacagggcgtaaaatcgtgggatgtatatggtctggattgattacgccattattgcggtaattggtttttcctgtttggttagccttatccgcggctttgttcgtgaagcgttatcgctggtgacatggggatgtgccttctttgtcgccagtcattactacacttacctggctgtctggttcacgggctttgaagacgaactggtccgaaatgggattgctatcgcgatattgtttatcgcaacgcttatcgtcggcgctatcgttaactatgtgataggcgctctggtagagaaaaccggtctgtcaggaacagacagggtgttggggatctgttttggcgccctgcgcggcgtgctgatcgtctccgctattctgttctttctcgatagcttcaccggtatggcaaaaagtgaagactggcaaaagtctgagcttatcccgcagttcagtttcgttatcagatggttctttgactatctgcagagctcgtcaagtttcttgcccaaagcataagcgttgggatgtagcttaacgaggaaaagacgtatgtgcggtattgtcggtatcgccggtgttatgccggtaaaccagtcgatttatgacgcgttaacggtgcttcagcatcgtgggcaggatgccgcgggcatcatcaccattgatgcaaataactgcttccgtttgcgtaaagctaacgggctggtgagcgatgtgttcgaagcgcgccacatgcagcgtatgcagggaaatatggggattggccacgtccgttacccaacggcaggcagttccagcgcttctgaagcgcagcctttttacgttaactcgccctacggcattacgttggcccataatggcaacctgaccaatgcccacgagctgcgtcaaaagctgtttgaagaaaaacgccgccacatcaacaccacctccgattccgaaattctgctcaatatcttcgccagcgagctggataatttccgtcattacccgctggaagccgataacatcttcgccgcgattgccgcgacgaaccgccagatccgcggcgcatacgcctgcgtggcgatgattatcggacacggcatggtcgccttccgcgacccgaacggtattcgtccgctggtgctcggcaagcgcgatatcggcgatggccgcaccgagtatatggtcgcctccgaaagcgtggcgctggatacattgggctttgagtttctgcgcgacgtcgcgccgggcgaagcggtctacatcaccgagaaaggccagctgtttacccgtcaatgtgcggaaaacccggtcagcaacccatgcctgttcgaatacgtctatttcgcgcgtccggactcctttatcgacaagatttccgtctatagcgcccgtgtgaacatgggcacgaagcttggcgagaaaattgcccgcgagtgggaagatctggatatcgatgtcgttattccgatcccggaaacctcctgcgatatcgccctggagattgcccgtatcctcgataaaccctatcgtcagggtttcgtcaaaaaccgatatgttggccgtacctttatcatgccgggccagcagctgcgccgtaagtccgtgcgccgtaagctgaacgccaaccgcgccgaattccgtgataagaacgtgctgctggtggacgactctatcgttcgcggcaccacctcagaacagattatcgaaatggcgcgcgaagccggtgcgaagaaagtgtatctggcctccgcggcgccggaaattcgcttccctaacgtttacggtatcgatatgccgaccgccaacgagcttatcgcccacggtcgcgaagttgacgagatccgtcagatcatcggcgctgacggcctgattttccaggatctgaacgatctgatcgaagcggtgcgcgcagaaaacccggatattcagcagttcgagtgttcggtctttaacggcgtgtacgtcaccaaagacgtagaccaacagtatctcgattatcttgattccctgcgcaacgacgatgcgaaagcggtccaactgcaaaccgaagttgaaaacttagagatgcataacgaaggctaattcgtcacttgtcgctggcccgccgtctttcgaggaccgcgggcctttttatttttacccgccaggttgcgtcggggactataatccggcaaagtctgcggcactatgcgcaaggggtataacatcgtgaaacgactcattatcggcatttccggcgccagcggcgcgatttacggcgtacgcctgctacaggtattgcgtgacgtcgcggaggtcgagacccatctgataatgagccaggcggcgcgtcagacgctgtcgctggaaaccgactactcgctgcgggaagtgcaggcactggccgatgtggtacatgacgcgcgcgatatcgccgccagcatctcctccggctcgtttaaaaccagcgggatggtcattctaccgtgctcgatgaaaacgctctctggcatcgtcaatagctataccgatggtctactgacccgcgcggcggacgtggtgttaaaagagcgtcgcccgctggtgctttgcgtacgcgagacgccgttccatctggggcatctgcgtttgatggtgcaggcggcggaaatgggcgcggtgatcatgccgccggtgccggccttctatcatcgtccccagtcgctggatgatgtgattaatcagacggttaaccgggtgatcgatcagtttgatattgacctgccgcaggacctgtttacccgctggcaaggcggagcatgatgcacctgtttggtgcattttatttacctttgccttccgctggtgcatttttgttgtcctgatcaaatcctcgacatttaatttgtttttttgcgttttgccgctgcggtttatccgccaatgctggtatcttccctcttaagacaatcttgcaactttatattaacaaatttaacgctgttaccggcacgcaccgggaaaatggcataaaacctgcaagaaccgtcggcaacatacataaccagacagcgcacaacataacaacatcacgacacttaagggctttctatgaagaagacgatcctggctctctcgttaatcatgggaatcagcagcgccgccagcgtatctgcggcgctgccgcaaagtatccgcatcggcaccgataccacctatgcgcctttctcgtcgaaggattcgaagggcaactttattggctttgacatcgatctgggcaatgaactgtgctcgcgtatcaaggtgaagtgcacctgggtgggcagcgattttgacgcgctgatcccctcgctgaaagcgaagaaaatcgacgcaattatctcgtcattatcgattaccgaaaaacgacagcaggagattgcgttctctgacaagctgtatgcggcagactctcgactgattgccgcaaaaggctcgccgattcagccgacgctggagtcgctgaaaggcaagcatgttggcgtactgcagggctccacccaggaggcctatgccaacgaacggtggcgcagccagggcgtggatgttgtcgcctatgctaaccaggatctcatctattccgacctcgccgcagggcgccttgatgcggcgctgcaggatgaagtcgcggccagtgaaggtttcctcaaacaacctgccggtaaagactacgcgtttgccggtccttccgttaaagacaaaaaatacttcggcgatggtaccggcatcggcctgcgcaaagaagatggcgagctgaaagccgctttcgacaaagcgctgggtgaaatgcgtaaagacggcacctacgacaaaatggcgaagaaatacttcaactttaacgtctacggcgattaagactgtagcggtctggttatgccaggccgctccattgcgacgcggttattgttgcccttgataggtgcaagcggttgatagcttgcaccagaatggggcggcagcagtttttctttgttcataaaatgcatagttaagcgtttctgatgcaaaaaaatctgctttcatgcgcattttgctttgccttggcagggcgaataatggcacgataactggcgtaagtgcttctaataaacccgttagaatgacagtctgttgaggataattatgaaaaaactggcgttgtctctttctttggcgctggccctttccagcgtttccacggtattcgcagctattccacagaaaatccgtatcggtaccgatcctacttatgcgccgttcgaatcgaagaatgcgcaggggcaattgatcggttttgacatcgatctggcgaaagagctgtgtaagcgtattaatacccaatgtaccttcgttgaaaacccgctggatgcgctgatcccctcgttaaaagcgaagaaaatcgatgcgattatgtcctcgctgtcgattaccgaaaagcgccagcaggagattgccttcaccgacaaactttatgccgctgactcccgtctggtggtgaaaaagggcagcgatattacgccagacctgagcaagctgaaaggcaagcgcattggcgttctgcagggcaccactcaggaaacctacggcaacgagcactgggcgccgaaaggcattgaaattgtctcctatcagggccaggacaatatctattccgacctgaccgcgggccgtattgacgctgcgttccaggatgaggtcgccgccagcgaaggtttcctcaaacagccgattggcaaagattatcagtttggcggcccgtccattaaggatgagaagttgtttggcgtcggtaccggcatgggcctgcgtaaagacgacaccgagctgcgtgaagcgctaaataaagctttcgccgagatgcgtaaagacggcacttacgacaagctggcgaagaaatatttcgactttaacgtgtacggcgactaatcatcgttagtacctcgccgcacgcgttttcacgtgcggcgatcgatgacagacagggcagacagcatgctgtacgggttctcacaggttatttttcagggcgcgctggtcacccttgagctggcgcttagctcggtagtgctcgcggtccttattgggctggtgggcgcgggggcgaaattatccgctaaccggcctatggcgctggtgtttgaaggctataccacgctgatccgcggggtgccggatctggtgctgatgctgctgattttctatgggctacagatcgcccttaacagcatcaccgatgcattaggcatggcgcaatttgatattgatccgatgattgccggtattatcaccctcggctttatctatggtgcgtacttcactgaaaccttccgcggcgcgtttctggcggtgccgaaaggccatattgaagcggcgacggcatttggcttcagcggctggcagacgttccgccgtatcctgtttccggcgatgatgcgctatgcgctgcccggtatcggcaacaactggcaggtgattctcaaagccaccgcgctggtgtcactgctcggtctggaagacgtggtgaaggcaacgcagctggcgggcaaaagcacctggcagccgttctatttcgctatcgtctgcggggcgatctatctggtgtttaccaccatttccaatggtgtgctgctgctgcttgaacgccgctactccgtgggtgtgaagagggctgacctgtgattgaaattattcaggagtactggaaatccctgctgtggaccgacggttaccgttttaccggcgtggcgatcaccctgtggctgttgattgcttcagtggtgatgggcggtatcctcgcggtgtttctcgccatcgggcgggtatcgagcaataaatatattcagtttccgatctggctgtttacctatattttccgcggcacgccgctgtatgtgcagctgctggtgttttactccgggatgtatacgctggaaatcgtcaaaggcagcgatctgttgaatgcgtttttccgcagcggcctgaactgtacggtgttggcattgaccttaaatacctgcgcctacaccaccgagatttttgcgggggcgattcgttcggtggcgccgggcgagattgaggctgcgcgggcttacggcttttcgtcagttaagctataccgctgcattattttgccgtcggcactgcgtattgcgctaccggcgtacagcaacgaagtcattctgatgctgcactcgacggcgctggcgtttaccgccacggtgccggatttgctgaaaattgcgcgtgatattaactcagcgacctatcagccgtttaccgctttcggcattgccgcggtactgtacttaattatttcgtatgtgctgattagcttgttccgcaaggcggaaaagcgctggttgcagcatatcaaaccctcttcgacgcactgagaaagccatgaccgacaataaattaagcgttatcgatctgcataaacgttacggcgagcacgaggtgctgaaaggcgtctcgctgaaagcgaaggccggagacgtgattagtattatcggctcatcgggttccggtaaaagtaccttcctgcgctgcatcaactttctggagaagccaagcgaaggaacgattatcgtcaatgggcagaatattggcctggtgcgcgataaagacggccagttgaaggtagcggataaaaaccagctgcgtctgctgcgcacgcgcctgacgatggtgttccagcacttcaacctgtggagccacatgacggtactggaaaacgttatggaggcgccgattcaggtgctcggcctcaacaaacaggaagcgcgcgagcgggcggtgaagtatctggcgaaagtcggtatcgatgaacgccagcagatcaaatatccggtacatctttccggcggtcagcagcagcgcgtgtccatcgcgcgggcgctggcgatggagccggacgtactgttgtttgatgagccgacatcggcactggatccggagctggtgggcgaagtgttgcgtattatgcaaaaactggcggaagaggggaaaaccatggtggtcgtcacccacgaaatgggctttgcccgccacgtctcttcacacgtgattttcctccatcagggaagaatcgaagaagagggacatcccgacgagctattcggcaacccgaaaagccagcgcctgcagcagttccttaaaggttcactgaagtaatcgcctcttcccggcgggttcgctcgccgggaatgacttaacgctccagccggtagatccaatcatcgtaatccacgccgttgaggtggtaagcattttccagcacctgaatgcgtacaaaaccgtgcttttccagcagccgggacgatcccaaattattgcccagcacccaggcattaatggcgtggatgccaagggtggtaaagccgtaatcacaaatcgcgcgcagcgcttcgctggcgtagccctgaccctgcgcttgcggcagtagcgcgtagccgacgtcggcctcgtgcgggtttttcgcgctgatgcgcagaccaatatcccccagcggcgtgccggcagaatcgcgcaatacaaagacgccggcatcttcgcagcggcattcaaacacgctgcgtagcgccgtttcgcttaacacctcacccatgtaacgcatgacgtcagggtcctgacgcagacgcagaaaaaagggccaatcggccggagtgaagcgggaaagcaacaggcggggcgttgttatcgtagtcataaagcaattaatcagctaaaacgaaagcctactttaccaccatgctgtgccgggtaacatgctcgccctcgcgaatcagcccgtgggtgacgtagcgctcagactttgcaggtagcgctgcacgcggtgattttccggtgaacggcgaagctgtagcgccaggttgaggctatccagcagtagggcgttagccaccatcggcgaatcggcggcgatgcgcttttccgcgactaaccattcaacgacggatttccagcgccagagaggggaattgcccttcacgcgctgtacggggccgggaaaccgcccgctgccgcgagcgccctcttttaatagcgcgatcgcctggcgggagacgccgataagttcggcgatatcgctcagcccgaccagtgtcgaatcgatggactccacgcggatatctggcagggcggcggtttctacatcgcggatggcggacagagccgcctgctccagcgattggccctcgcgatcgaactcgaggtagaccgcagtaccgtaaaagcagaccagcgcgtcgctacagcctgcggcaaagagcgcatcttccagtcctggcgtttgactggtgacgccggacagcgtcagcgtaaaattaaatatcggcatcgtttagcgttccttatgcatggtgcgcgcggtagccgggatgggacaccgttcgaccattctgattatttgccgggcgtggttttcagggacggcgggcgtcgaccaaatgctcatcatatgttcacggtgttcagccacgccgcagacgagtcggccaaagcaatgagcgcttttacctgcaggaagcaatatccaccctcgcgccagcgccgtagcaatcgccttcctgatatgtttgtccggatgttccttcatcgtcaaatcctgctcagaataaaaagagtgttgacggctgtcaacgctttttgagggtatattcctcgtcaggacgttatggcaggagaatatttttgcggttggaatgggcttcacaagaagcgtagcaaggaggacgaggaactaacgatttgcgaggcggcttccgcccaagggaagaaaacggggagccgttgctccccgtttatcgacttagcccaacacatccttcagcgcctcttccagatcgtaccagcgaaagctaaagccggcggcttccaggcgtttaggcagcgcgcgctggccgccgagcaccagtaccgaggattctcccatcagcaggcgaatggcggcggcgggaacgcggaaaatcgccgggcgattgagcgcgtggccgagcgcgtgggcaaactgttcgttacgtacgggatagggtgagaccatattgaacgggccgcgcagatcgttatccagcagccacaagatcccgttcaccatatcatcgatatggatccacgccagatactgacgaccgtcgccgatagggccgcccaggccgagcttaaacgctggcgtcattttagccaggatcccgccccgcggcgctaatacgacgccggtgcgcaacaggcacacgcgcgtgcgatcgctttgcgcctcacaggcgatttgctcccagcgggcgcaaagtttatgggtaaattcattgtgcggcggctcttcctcggtcaccacgacttcaccgaggtcgccgtaatagccggtagcggaaccgctaatcagcgctgacggtggggtttcgctggctttaaataacgcgaccagttgccgggtgatgtcccagcggctgtggcacaggcgctctttttgctctgccgtccagcgcttatcggcgatcggttcgccggcaaggttaatgacggcgtcaaagccatcgaggttgttttgcccttcgaaaccgcgccacagcgtgacgcggggatcgagacgggctttcgcgcgttcagggttgcgggtggaaaccgtgagctggtgcccaagttccagcagcctggtaataagatgccgaccaatgagcccggtaccgccagtgagcaggattttcataccgcctcccttacaaacgttttagcgccgccagctcatggtcattgatactgagtcggcatagcgcagcgcgtgaagtttatcgatctctacttcagcataagtgacccagtgatgttcgcatgcgatattgagcacatcctgggttaatttttccagcagcgagaagcggttattctcgatatggctgatgatgcgcttagtaatggtgcgatagttcagggcatcattgatgtcttcgctgtcgcgagccttatcggccggatagtgaatcaccacattcaccaatacgtcctgacggttggcgatctcttcctctttgattccaataaaagtacgcaggcgcaggttcttaatacgaataatggcgtctggctgagacattgcaggcttcctccgtgtagtaatttccgcaatcatacatgaaagcacgccctgcgagcaggggattaatactgttgcgttttgagtagcgcctgttgcgttgccgggcgctggcggatgcgttcaaaccagttatgcaccgccgggaactggctaagatcgatgcgttggcgcgagtgggcattaatccatggccagcaggcgatatcggcgatactgtagtgctcgccgcccaaccatggactggcttcaagacgccggttcattacgccatacaggcgctggctttcgacctgatagcgttcaatggcgtaagggacagcctgaggcgcgtgatggttaaagtggtggttttgcccaagcattggccccagaccgccgacctgccagaatagccattgcagggtagtatgccgctcgcgcagctcgccgcttagtaattttcccgatttctccgccagatagagcaggatctctcctgactcaaacaggcttaacggcgcgccgccgtcgaccggaacgtggtcaacgatcgccgggatcttattatttggcgagatagccagaaactgcgggcgaaactgttcacctttgccgatatcgacgcgtatcaggcgataggccagctgcgcctcttcgagaaaaagagtgattttgtggccgttgggggtaggtgcgtagtaaagatcgatcatgaggtctcccgccatcgaaggtcgcaaacgtttcgagtataggcgacctgcgccatcgcggggcaaagattaaaattgcgaaatcctcatgtggctgccagtgacatcttatagcagaccagctatgttgatttatcaccccctggcttcattgaggatgtcatgaatcagcctgttattactctgtggtccgatgccgattttttctccccctatgtgatgtccgtgtacgtggcgctgcaggaaaaaagcctgccgttcacccttaaaaccgtcaatctcgacagcggcgagcatctgcagccgggctggaagggctactccgcgacacggcgtgtgccgctgctggaagtggataatttttcgctgagcgaatcctcggccatcaccgaataccttgacgagcgctttgcgccgccggaatgggagcgcttgtatccgcatgacctgcaaaaacgcgcgcgggcgcggcaggtgcaggcctggctgcgaagcgatctgatgcccatccgcgaagaacgttctaccgacgtggtgtttggcggcgcgaagaagcctgcgcttagcgctgcggggcaaaccagcgcggctaaactcttcgctaccgccggcgcgcttttggcgcatggcggacagaatctgtttggcgaatggtgtatcgccgatgccgatcttgcgctgatgctaaaccgtctggtgctgaacggcgatgaggtgccggaagcgctggcggactatgcgaccttccagtggcaacgggcatctgttcagcgttatgccgcactgtcggctaaacgtagcggctgataagcgcaggcagttccgttatcatagacagaccgtattgtctggtaaggggttgatatgaaactgatgttcgcatccgatattcacggctcgctgcctgcgaccgaacgcgttctggaacgcttcgcgcagagcggggcgcagtggctggttatcctcggcgatgtgctcaatcacgggccgcgcaacgcgctgccggaagggtatgcgccggcgcaggtcgccgagcggctgaacagcgtcgcgcagcggattatcgccgtccgcggtaactgtgatagcgaagtcgatcaaatgctgctgcatttccccattactgccccctggcagcaggtgcttagcgaacgctaccgcctgtttttgacccacggtcatctctatagtccggataatttgccgccgctcgctgctggcgatgtactggcttatggtcatactcatattccggttgccgagaaacgcggcgatgtattcctcttcaatcctggctctgtgagcatcccgaaaggcggctttgccgccagctacggcatgctggaagatgatcggctgcaggttttcgcactcaatgataatcaggttattgcagaggccgcgatttacccgtaatttacccctcaatcgtaaagacgcgccgcgagagcgcttaaaagtaaggtttcctgatggcggaacagaagcatttggcaagcacagaatgggtcgatattgttaatgaaaacaatgaagtgatagcacagtccagccgcgagcaaatgcgcgcgcagtgtctgcgccaccgcgcgacctatattgtggttcatgatgggatgggcaagattctggtacagcgccgtaccgagagcaaagatttcatgccgggcatgctggatgcgaccgcaggcggcgtggtgcaggcggatgaacagctgctggactccgcgcgccgcgaagcggaagaagagctggggattgcgggcgtgccttttgccgatcacggccaattctactacgaagataaacactgccgcgtctggggaagcctgtttagctgtgtttctcatggcccgttcgccctgcaggaagaagaggtcagcgaggtatgctggttgacgccggaagagatcaccgcgcgctgcgatgagttcaccgccgattcactgaaagcgctggcgctgtggatgacccgtaacgcgggcaataccggccacgatcgcgacgagccggaagaagacgaagcgtaatttcctttacgcgttagagccataaaaaaggcagccatttggctgccttttttgtctcagcgggagattatttctgctgctgagaagactgaatcgccgtcagtgcgatggtgtagacgatatcgtctaccagcgcgccgcgggacaggtcgtttaccggcttacgcataccctgcagcatcggcccgatggagatcaggtcagcggaacgctgtacggctttgtaagtggtgttaccggtgttcagatccgggaagatgaacacggtcgcgcggccagctaccggagagtttggcgctttggacttcgcaacatcggccattaccgcggcatcatactgcagcggaccgtcgatcatcaggtcaggacgtttttcctgcgccagacgagttgcttcgcgtactttttctacatcgctacctgcgccggaggtgccggtggagtaggagagcatcgccacgcgcggttcgataccgaaggcaatcgcggaatcagcggactgaatcgcgatttccgccagctgttcagcagtcggatccgggttgatcgcgcagtcgccgtaaacgtaaacctgttccggcagcagcatgaagaatacggaagagaccagcgagctgcccggtgccgttttgataagctgcagcggcggacggatggtattggctgtggtgtgaaccgcgccggataccaggccgtcgacttcgtcttgttccagcatcagggtgccgagaaccacgttatcttccagctgttcgcgcgcaaccgcttcggtcatacctttgttcttacgcagttcgaccagacgcgccacgtagctttcgcgaaccacttccggatcgacgatttcaataccagcgcccagctctacgccctgagaggccgcaacgcggttgatctcatccgggttgcccagcagcacgcaggtagcaataccgcgctcggcgcagatggccgccgctttaacggtacgcggtttgtcgccttccggcagaacgacgcgtttgcccgctttacgcgccagctcggtcagctggtagcggaaggccggcggagacagacgacggctgcgctcggaggtcgcggtcagcgattcgatccagtcggcgttgatgtagttggcaacgtattcctgaactttctcgatgcgctcgtgatcgtcaaccggtacttccaggttgaagctctgcaggctcagagaggtctgccaggtgttggtgttaaccatgaacaccggcaggccggtggcgaaagcgcgttcgcacagtttgctgatgcgcgcgtccatttcatagccgccggtcagcaggatagcgccgatttctacgccgttcatcgccgccaggcaggccgcgaccagtacgtcaggacggtctgcggaagtcaccagcagagaacccggacggaagtgctccagcatgtgcggaatgctgcgcgcgcagaaggttacggacttcacgcggcgagtattgatgtcgccttcgttgatcacggtcgcgttcaggtgatgcgccatgtcgatagcgcgcgtggcgatcagatcgaagctccatggcaccgcgcccagcaccggcagcgggctgccgttctgcagctgcgccgggtcgatcttcacgactttcgctttagacgagtcgtcgaagatttcggacaggtcagggcgggtacggccttgttcatcaaccggagcattcagtttgttaacgataacgccagtgatgctggtgttcttcgcgccgccgaagctgttgcgagtcagttcaatacgctcgttcagctgttccggggtatcggtgccctgagacatcacgaagacgatttccgcgttaagcgttttcgcgatttcgtagttcagagactgagcgaactggtgtttacgggtcgggaccaggccttcaaccagcaccacttcagcatcctgagtgttggcatggtagttggcgatgatctcttccatcagcacgtctttctggttgctggacagcagcgactcaacgtggctcatgttcatcggttcagcggcagtcgtcgttgaagagctggcgcgaacgatggtggtagtctggtctggagtatcgccaccggaacgcggctgggcgataggtttaaagacgctcaggcgaacgcctttgcgttccatagcgcggataacaccgaggctgacgctggtcaggcctacgctggttccggtagggatcagcatgatagtacgggacacgatatatcctctttcgttaccgccagttttaggcgggatacaaaacagcaccgccagcttaccgttcatacttcaagtggcaactcgaagcagtcaggattatcgctggcggtgtggaattaagcggtcagacggtgtgcgtcttgagcgatcaccagctcttcgttggtcgggataaccacggcagggcgggtgccttctttgttgatgaagccagacttaccgaaacgggcagccaggttacgctcgtgatcaacttcgaagcccagaacgcccagtttacccagggacagttcacgaaccatcgcggcgttttcaccgataccaccggtgaagacaacggcgtccagacggccatccatcagcgcggtgtaagaaccgatgtatttcgccagacggtggcagtaaacgtccattgcgcgtttagcgtcagctttatccgcgtagttgtcttcaacatagcggcagtcgctggtgacttcggtcagacccagcaggccggactctttggtcagcattttgttgatagcatctacgctcatacccagcgcgtcgtgcaggtggaaaatgattgccgggtcgatatcgccagagcgagtacccatcaccagaccttccagcggggtcagacccatggaggtatcaacgcatttaccgttacggatagcggaaacggaaccgccgttgccgaggtggcaggtgatgatgttcagttcttcaaccggcttgttcagaaccttagcggcttcctgagtcacatagtagtggctggtgccgtgcgcgccgtaacgacgtacgccgtgctctttgtacaggctgtacggcagggcatacaggtaggactcttccggcatggtctgatggaacgcggtgtcgaacacggcaacgttcttgtctttcaggtgcgggaaggatttcagcgcttcagcgataccgatcaggtgcgccgggttgtgcagcggtgcgaaggaagcggagtctttgatgccctgaataacggaatcgtcgatgacaacggaactggtgtatttttcaccaccgtgaacgatacgatggccaattgcggtcagctgtgctgacagttctggtttttgtgccagaatagtgttaacgataaagttcagcgcttcactgtgagcggcgcctgcgcctaactcagcttcgtgtttgccgccgtccattttccatttgatacgggcttcaggaagatggaaacattcggctaaaccggagagatattcgtcaccgttaacggcatccaggatagcaaatttcagggaagagctaccgcagttcagaaccagtactaacttactcgacatggaagtaccttttatgatacgtggctaaaaaaacatcagtgtgtcacaaagcgtagcgcaggatgacatcgacatttatgattaacatcatgccttgttctgttttctggcacgatgagggaagtacatatgattttatgtcattttgcataattttccgccagcagcagaatatgcgataatttgactaacctggtaaaagggtctaaccgccctctcaggtgggcacaggatacctgattgccgcacccattgccaaaatcttttgaacgttgtcatgcacagttggtgttttgcacgaaaattttaagttttatatgtaaagttgaggtatagccatgtcgacccctgagaatcgccccgttagcttttttagcttgtttcgtcgcgggcagcactatgcgaagacctggcccctcgataagcggctggcgccggtgtttatcgaaaaccgcattattcgcgccacccgctacgcgattcgcatcatgccgccggttgcggtcttcaccctgtgctggcagatagcgctcggcggccagctcggtccggccgtcgccaccgcgctatttgccttaagcctgccgatgcaggggctgtggtggttgggcaagcgttccgtcacgccattaccgccatcaatactgaactggttttatgaagtgcgcggcaaattacaagaggccgggcaggcgttagcgccggttgacggcaagccggattaccaggcgctggctgacacgcttaagcgcgccttcaaacaactggataaaactttccttgatgatttgtaattccatacggaaaacgcatataaaagaaggcgcatgatttatgcgccttctttatttcacgccgtaagtgctacaggagtcaaaaatggaaatgaccaatgcgcagcgtctgattttgtccaatcagtacaagatgatgactatgctcgacccggacaacgctgaacgttaccgccgtctacagaccatcatcgagcgtggatatgggctgcaaatgcgcgagctggaccgcgaatttggccaactgacggaagaaacctgccggacgattatcgatatcatggagatgtaccacgcgctgcacgtctcctggaccaacctcaaagatgcgtccggtattgatgaacgccgggtcaccttccttggctttgatgtcgccaccgaggcccgttatctcggctatgtgcgctttatggtcaatgtagaagggcgctatagccacttcgacgcaggaactcacggctttaactcgcagacgccgatgtgggaaaaataccagcgtatgctggccgcctggcactcctgtccgcgccagtatcatttgagtagtaacgaaattaaccaaattattaatgcctgatggaggtgcccgtgcagtgtaaaggtttcctgttcgatctcgacgggacgctggtggattctttaccggttgttgagcgttcatggtgtaaatggggcgatcgtttcggcattccgcacgatgaaattctcggtttcattcacggtaaacaggccatcacttcgattcgccattttatgccggggcgcagcgaagaggatattcaggccgagttccgcttccttgagcagattgaagccaccgatatcgacggcattgtcgcactgccgggcgcgttaaacttgctgaatacgctcaatgaagccggtatcccctgggctattgtgacctcggggtcgattccggtcgctcacgcccgccaccgcgcggcaggtctgccgatgccgaaagtgtttgtcaccgccgaacaggtgaagaaggggaaaccggcgccggatgcctatctgcttggcgctgaactgctggggataccggcgcaacagtgcgcggtggttgaagatgcgccggcggggctgctttccgggctggctgccggatgccgcaccatcgccgtcaacgttccggcggatgcgccgcgtcttgatgaagccgatctggtgctggcgactctcgaaagtttgcgcattgaacggcaggcggacggcaatgttcaggtgaatcttaaagcataatctcatgacttagccccgcgtcgccggggcttttttgtgccacaatttcggctccctcttcagacaaggataagttgtgaacggtgaattgatttgggtgttatcgctactggccatcgcggttgtcttgtttgcaaccggcaaggtgcgcatggatgccatcgcgctgatgatcattgtggcgtttgtgcttagcggtacgttaaccctcagcgaagccttctccggctttagcgatccgaacgtcattctcattgctgcgttatttatcattggcgatggcctggtgcgcaccggcgtggcgactaaaatgggctcctggctggtcaaggttgccggtaatagcgaaaccaaaatgctggtctacctgatgctcaccgttgccgggctgggcgcgtttatgagctcaaccggcgtcgtggcgatatttattccggtggtgctcagcgtttcgctgcgtatgaatacctcgccatcgcggctgatgatgccgctgagcttcgccgggctgattagcggcatgatgaccctggtggcgacgccgccgaacctggtagtcaacagtgaactgctgcgcgaagggttgcatggattcagcttcttcagcgtgaccccgattggcctggtggtgctggtgctgggtatcgtctatatgctggtgatgcgctttatgctgaagagcgaagatgacagcgccgctcgcgatgtgcgcaagaaaagcacctttcgtgatttaatcaaagagtaccgccttaccggcagggcgcgccggctggcgattcgtccgggctcgccgatgatcggccagcggcttgatgatttaaagctgcgtgaacgctactgcgccaacgttatcggcgtcgaacgctggcggcgttttcgccgggtgattgtcaacgttaacggggtatcggagtttcgcgcccgtgacgtgttgctgatcgatatgtcagcctccgacgtcgatctgcggcagttttgcggcgaacagatgcttgagccgatggtgctgcgtggcgaatactttgccgatcaggcgcttgacgtcggcatggctgaagtctcgttaatccctgattcagagcttatcggtaaaacggtgcgcgagatggcttttcgtacccgttttggcctgaatatcgttggcctgaagcgcgatggtaaagcgctcgatggcgcggtagtcgatgaacctctccagttaggcgatattatgctggtggtcggcaactggcggcagatagccatgctggcgaaacgtggccgcgattttgtggtgctgaatatgccggtagaggtcaatgatgcttcgccagcgcacagtcaggcgccgcacgccatattctgcctggtgttgatggtagcgctgatgcttaccgatgaaatccccaaccctatcgctgccatcatcgcctgcctattgatgggcaagtttcgctgcatcaacgccgagagcgcctataaggcgattcactggccgagcatcattttgattgtggggatgatgccgtttgccctggcattgcagaaaaccggcggcgtggatttggtggtgcaggggttaatggacgtcgccgggagcaaaggcccctacttgatgctgggttgtctgtttgtgatgtgcgcggcgattggtctgtttatctctaacaccgcgacggcggtgctgatggcgccgattgcgctggcggcggcgaaatcgatgggggtatcgccgtatcccttcgccatggtggtggcgatggcggcttcggcggctttcatgaccccggtctcttcaccggttaacacgctggtgctcggacccggtaaatattcgttcagtgattttgtcaaaatcggtgtgcccttcaccgtactggtgatggtggtctgcgtgctgctgatcccggtactctttccgttttaattcattcaggccgggcaggggatgcccggcctgaaaattaaagcggtgaatcctggctgatttcatcgagcgacagctggaagctcgggacaaatacttgcataaagtaatccatctccgggctacggcgcgactccagcgttttttccagccgacctttagccagcaggaattcgttattgccggcggaaagctcttcaagacatttcagataggcgcaaagagcgtcggcctgcttcacaatcgactgctcttcttcactgtaatggtgctcatcaatcaggggctcaaagatatcgcgcagctcatcgggaaccatatcgaccagtttttgctgagcgattttctcaatcgccttatattcctgggcaatctgcgaattgaagtatttcaccggcgtgggcagatcgccggtgaggacctcggaggaatcgtgatacatcgccagcagggcaatacgttcggcgttgacctggccgccaaacttgcggttcttaattgccgccagcgcatgggcgaccatcgccacctgcaaactgtgctcggagacgttttcggtacgcacgttgcgcatcaaaggccagcggttaattagtttcaggcgggagaggtgggcaaagaaatgactctgactcataggaacccttaagcggtgacaacatcaggttccattgtgcgcagggatcgccgccggatgcaaataccggcggcggcgcgattaaagctgatgatagccggagaggaaacggccaaagcgggaaatcgccatttccaggtcatcttcacgcggcagggtgacgatacgcacgtgatccggccacggccagttaaaggcggtgccctgaaccagcagcactttctcctgtagaaggaagtcgagcaccattttctggtcatcgtggatattaaagcgtttggcgtcgattttcgggaacatatacagcgcgcctttcggcttgacgcaggagacgcccgggatctcgttgattaactcccaggcgcggttgcgttgctcatacaaacgcccgcccggaatgataaattcgctaatgctctgatagccgcccagcgcggtttggattgcgtgttgcgccgggacgttggcgcacaggcgcatcgaggccagcatttccagcccttcgatatagcctttggcgtgctttttcggcccgttaagcaccatccagccctggcggaaaccggcgacacgataggtcttcgacagtccgttaaaggtgacggtcagcatatccggcgccagcgcggcgatcgaatggtgttcggcatcgtcgtacaggatcttgtcgtagatttcgtcggcgaaaataatcaggttgtgctgacgggcgatctcgacgatctcctgcaacagttctttggaataaacggcgcccgtcgggttattcgggttaatgatgacgattccacgggtgcgtggcgtaattttggcgcggatatcgtcgaggtccgggaaccagtctgaggattcgtcgcacaaatagtgcaccgctttgccgctggaaagggagaccgcagcggtccacagcgggtagtccggagccggaaccagcatttcgtcgccgctgttgagcagcgcctgcatggcctggacgatgagctcggaaacgccgttaccgatatagatatcttccacggtaacatcgcgcatcccgcgcgcctggtagtgctgcataatcgctttacgggcggaatagagaccttttgagtcgctgtagccctgggcggtcggcagattgcggataacgtcgacgagaatttcgtcaggcgcatcgaagccgaacggcgccgggttgccgatattcagcttgagtactttgttgccttcttcttcaaggcgttttgcttctttgagaaccggaccgcggatgtcgtaacagacattctctaacttgctggatttttcgataggggacatgaacctttgaccttttagctgttatcgccactccctgccgtggaagtcagcacggaacaatgtactccgcatccccgctgttttgaagggttaacaggagaagattttgctaatagtatttttttagagtaatgaatttatctgtgtaatggcgttattctttatataatgtgcctggtatgggtttttgaatggttttatgttgcgcgtattgggtgattacatggatgtttatccggtttgttgctgaaggaaaaagcggtttgccggaattttaacctctaaaagacactatgctaataaaaagagggcgatggcgactgtagcaactatgttaattttttttaataaaacatgccaatgaatgaatcaggtatatttgattgcatggattatttcggcttttgttaatttaattatagtgctgcaaaaaagtttaaaattaccttagataatactgattagcgcttataaatattgtggttttcggttaggataagacagttaatatcgacgtgtaaacctctgtttaacggcgtgattttattaatatattgttattgcaggcttttttgtttgtgttcagcaggcgttgttatgcgtgtcgggcttcctggcgtaacgacatctgttattgcagactttgtttgagattcatcacataaccgaagtctcagtaattaaaaatgcgtagagctacgaacaaaatattactcaaatttttcgcacatttgtcgcgaacgagtgctttcacatgcaatgacgttcttccagttgtcctccgcggaatttgtccgctcggcacgaggctcatggaatagccggaaacctggatacagcatcaacaaggcaggccagcattagcgcctgtaagtgaagaaatatgataaatgcaaatcgtccgatactgaatctcgatctcgatctgctgcggaccttcgtcgccgtcgccgatctgagcaccttcgcggcggccgctgccgcggtatgtcgtacccagtccgccgtcagtcagcagatgcagcgcctggagcaactggtaggcaaagagcttttcgcccgtcatgggcgcaataaattactgaccgagcaggggatccaactgctcagctacgcgcgcaaaatactgcgctttaatgatgaggcctgcatgtcgctgatgtttggcagcctgcaggggacgctaactatcggcgcttccgatgaaacggcggataccatcctgccttacctgctcaaccgaatcggcagcttctatcccaaactgacgctggaaataaaggtcctgaattacgccgatatcgtcgcgaagttgggcagcggcgagatcgacctggcattaacgacgcatcaaaccggcgaatttgacgtcctgacgctgcgtacctcgccgacgctgtggtactgcgccgcggattacgtactggcgcagggtgaatccgttccgctggtgctgctcgaagagtccgggccgtttcgcgaagatatcatctccgcgctgaacgctgcgcaggttccctggcatttggcgcatgccgccagttctttagccggggtgaaggcggcggtgaaagcgggccttggcgtcaccgcgcgtccggtagaaatgatgagtccggagctacgcgttccgggtaaaagcgatggcctaccgggcttgcctgatacccactatgtgctgagctgcaatccgcagcgggaaaacgaactggcgcaggcgatttttcagtcgctgagccaggaccataatccgtggaacacggaaaccctatataccccggaagggggagacagttctctggtttcataaagccgaattatcatatatcgatcacaataatccggtaacaaaatgtaagtgtaaaaaagagccaccgatcgacaaaatggggtcagtggctctttttttttatattttacaaggattttaagcagtttaataatttattgataaatgaatcaatgagttgggttgaaagcgaccattgtttctctgtttttagctgcagtttcaatacttcctgctaatgttaaaaaaccggacggattgttgccgttttccagatgtaattaacaaaagcgtgtcacagatcaagaaaatacccctacttggggggaggaatcgcggccaaatcctgtcaaaatagattggcgaaattgatttacgtctaaaacggacacgattcaacaacactaaatccgaatgatatgcaaggttattacgcaacaaagggcatttaatgttaatgaaaatattccaatgtaaattaatgtagttaaaacttttgttaaagttgacaaaaggttaaagaaaggggtaaaaagccacggcatttgggcttcctcatcaaccagggacgcttttttgcaaggtcatttttttattcctcccgtgaaacgctgtggcgttcatctgccatcaagagcagagggttttggcgctacacttttttggttaagcaatgcgtatgtcaacatccactgaagtcatcgctcatcattgggcattcgctatatttctcatcatcgctatcggtctgtgctgcctgatgctcgtcggcggctggtacctcggcggtcgcgcgcgcgcgcgtagcaaaaacacgccgtttgaatcggggatcgactccgttggttcggcccgcttacgtctttctgcgaagttttatctggtcgccatgttcttcgttatcttcgacgtggaagccctgtatctctacgcatggtcaacatccattcgcgaaagcggctgggttggctttgtggaagccgcaattttcattttagtgctactggctggtctggtttacctcgttcgcatcggcgcactggactggacgcctgcgcgttcccgtcgcacgctggttaacccggaaacagacagtcccactaaccgtcatatgcagtaaaagcgaggcaataagatggattatacgctcacccgcatagatcctaacggtgagaacgaccgttaccccctgcaaaaacaggagatcgtaactgaccccctggagcaagaagtcaataaaagcgtgtatatggggaaactcgaacacgcgctgcatgacatggtgaactggggccgtaagaactcgatttggccgtacaacttcggcctgtcttgctgctatgtagaaatggtgacgtcattcactgcggtgcatgacgttgcgcgttttggcgcggaagtactgcgtgcctctccgcgtcaggccgacctgatggtggtcgccggtacctgcttcaccaaaatggccccggttattcagcgcttgtacgatcagatgctggagccgaagtgggttatctctatgggcgcatgcgctaactccggcgggatgtacgatatctactccgtcgttcagggcgtggacaagtttattccggtggatgtttacatcccgggctgtccgccgcgtccggaagcttatatgcaggcgctgatgctgctgcaggaatccattggtaaagagcgccgtcctctctcatgggtggttggcgatcagggcgtctatcgcgccaacatgcaatccgagcgcgagcgtaaacgcggcgaacgaattgcggtgaccaatctgcggactccggacgagatttaacttgcgcctgcgggcgggaaccagacttcgcaaatcaatctacaaaagcagcgaagcctcgcccggcagtcaccacggaccttttgcaatggtgaacaatatgactgatttaaccgcgcatgacgccgcaccagcctggcaaacccgcgatcaccttgatgacccggtgatcggcgaactgcgcaaccgttttgggccggatgcctttaccgttcagcctacccgtaccggcgttccggtggtgtgggtgaagcgcgaacagctgcttgaggtgggtgatttcctgaagagattgccgaaaccttacgtgatgctgtttgacctgcacggcatggacgaacgtttacgtacgcaccgcgatggcttgccagccgcggatttttccgttttctaccacctgatctcagtagaccgcaaccgcgatatcatgctcaaggtggcgttgtctgaaaacgatctgcatctgccgaccttcaccaaactgttccctaacgccaactggtatgagcgtgaaacctgggaaatgtttggcgtgaccttcgacggtcacccgaatctgcgccgcatcatgatgccgccgacctgggaaggccacccgctgcgtaaagactatccggcgcgcgccaccgaattcgatccgtttgagctgaccaaagccaagcaggatctggaaatggaagcgttaaccttcaagccggaagagtggggtatgaagcgcggcaccgaaaacgaggactttatgttcctcaacctcggcccgaaccacccgtccgctcacggcgcattccgtattattctgcagttggatggcgaagagatcgtcgactgcgtgccggacatcggctaccaccaccgcggcgcggagaagatgggcgaacgccagtcctggcatagctacatcccttacaccgaccgtatcgaatacctcggcggctgcgtcaacgagatgccgtacgtgttggcggtggagaaactggccgggatcaccgtgccggatcgcgtgaacgtgatccgcgtgatgctgtccgaactgttccgcatcaacagccacctgctgtatatctcgacctttattcaggacgtcggcgcgatgaccccggtcttcttcgcctttaccgaccgtcagaaaatctacgatctggtcgaagccatcaccggtttccgtatgcacccggcatggttccgcatcggcggcgtcgcccacgacctgccgcgcggctgggatcgcctgctgcgtgaattccttgagtggatgccgaagcgcctggattcctatgagaaagccgcgctgcgcaacaccattctgattggccgttccaaaggcgttgccgcctacaccgcaaaagaagcgctggagtggggcaccaccggcgcaggtctgcgcgcgaccggtatcggcttcgacgtgcgtaaatggcgtccttattctggctacgaaaacttcgactttgaaatcccgaccggcggcggcgtttccgactgctacacccgcgtgatgctgaaagtagaagagctgcgccagagcctgcgcattctccagcagtgcctcgataatatgccggaaggcccgttcaaagcggatcacccgctgactacgccgccgccgaaagagcgcacgctgcagcacattgagaccctgattacgcacttcctgcaggtttcctggggcccggtgatgccggccaacgaatccttccaaatggttgaagcgacgaaggggattaacagttactacctgaccagcgacggcagcaccatgagctaccgtacccgtattcgtaccccgagctatgcgcacctgcagcagatcccggcggcgatccgcggcagcctggtatccgaccttatcgtctatctgggtagtatcgattttgttatgtcagacgtggaccgctaattatgcacgagaatcaacaaccacaaaccgaggcttttgagctgagtgcggcagagcgtgaagctattgagcacgaaaagcaccactacgaagacccgcgtgcggcgtccatcgaagcgctgaaaattgttcaaaaacagcgcggctgggtgccggatggcgcgatctacgcgatcgccgatgtgctggggatcccggcaagcgatgtcgaaggcgtggcgacattctacagccagatcttccgccagccggttggccgtcacgtgatccgctactgcgacagcgtggtgtgccatatcaccggtttccaggggatccagtcggctatcgagaaaaagctggacatcaaaccgggtcaaaccacctttgatggccgcttcacgctgctgccgacctgttgccttggcaactgcgacaaggggccgaccatgatgattgatgacgacacacacagttatctgacgccggaagcgattcctgacctcctggagcggtataaatgaaaaccattattcgtactgccgaaacgcatccattaacctggcgtctgcgcgatgacaagcagccggtgtggctggacgagtatcgcagcaaaaacggttatgaaggggcgcgcaaggccttaagcggcatggcgccggatgaaatcgtcaatgcggtaaaagacgccggcctgaaagggcggggcggcgcgggcttttccaccggtctgaagtggagcctgatgccgaaagacgagtccatgaacatccgttacctgctgtgtaatgccgatgaaatggaaccgggtacctataaagaccgtctgctgatggaacagctgccgcacctgctggtggaaggcatgctgatctccgcctttgcgctgaaggcctaccgtggttacatcttcctgcgcggcgaatatatcgaagcggcgcagcatctgcgtcgtgcgattgccgaagctaccgaagcgggcctgttggggaaaaatatcctcggtaccggttttgacttcgagctgttcgtgcacaccggggcagggcgctatatctgcggtgaagagacggcgcttatcaactcgctggaaggccgtcgcgcgaacccgcgctccaagccgccgttcccggcgagctccggcgtgtggggcaaaccgacctgcgtcaacaacgttgaaaccctgtgcaacgtccctgccatcctcgccaacggcgtggagtggtaccagaatatttcaaccagcaaagatgccggcaccaagctgatgggcttctccgggcgcgtgaagaatccgggcgtatgggagctgccgttcggcactaccgcgcgcgagatcctcgaagattacgccggcggcatgcgcgatggcctgaagtttaaagcctggcagccgggcggcgccggtaccgacttcctgaccgaagcgcacctcgatttgccgatggagtttgaaagcattggtaaagcaggtagccgtctgggcaccgcgctggcgatggccgtcgaccacgagatcggcatggttccgctggtgcgcaatctcgaagaattttttgcccgcgaatcctgcggctggtgtacgccttgccgcgacggcctgccgtggagcgtgaagatcctgcgcgccctggagcgcggcgaaggccagcctggcgatatcgaaactcttgagcaactgtgtcgattcctcgggccgggtaaaaccttctgcgcgcacgcgccgggcgcggttgaaccgctgcagagcgctatcaaatatttccgcgaagaattcgaggctggcattaagcagcagttcagcaatacccatgcaattaacggtattcagccgaacctgcttaagacgcgctggtaatctaaaggttttttatttttggaagcacgcaaatggctacgattcatgtagacggcaaagaatacgaggtcaacggagcggacaacctgctagaggcttgtctctctcttggtcttgatattccatacttttgctggcacccggcgctagggagcgtcggtgcttgccgccagtgtgcggtgaagcaatatcagaacgcggaagacacgcgtggtcgcctggtgatgtcctgtatgactccggcatctgacggcacctttatttctattgacgacggcgaagcgaagcagttccgcgaaagcgtggtggagtggctgatgaccaaccacccgcacgactgcccggtctgcgaagaggggggcaactgccacctgcaggatatgacggtcatgaccggccatagcttccgccgctatcgtttcaccaagcgtacccaccgcaaccaggatttggggccatttatttctcacgaaatgaaccgctgcatcgcctgctaccgctgcgttcgctactataaagattatgccgacggcaccgatctgggcgtttatggcgctcatgacaacgtctacttcggccgcccggaagatggcacgctggaaagcgaattctccggtaacctggttgaagtctgcccgaccggcgtcttcaccgataaaacacactccgagcgttacaaccgtaagtgggacatgcagtttgcgccgagcatctgccagcagtgttccattggctgtaacatcagccctggcgaacgctatggcgagctgcgtcgtatcgaaaaccgttataacggcaccgtgaaccgctacttcctctgcgaccgcggtcgtttcggctatggctacgtaaacctcaaagatcgtccgcgtcagccggttcagcgccgcggcgacgatctgatcgcgctcaacgccgaacaggcgatgcagggggcggcggatatcctgcgccagtcgaagaaagtcattggtatcggttctccgcgcgccagcattgaaagtaacttcgcgctgcgtgagctggtcggtagcgaaaacttctataccggcatcgctaaaggcgaacaagcgcgcctgcagatgatgctcaaagtgctgcgcgagggtgggatccataccccgacgctgcgcgatatcgaatcgtacgatgcggtactggtgctgggcgaagacattacccagaccggcgcgcgcgttgccctggcggtacgccaggcggtgaaagggaaagcacgcgaaatggcggcggcgcagaaagtggccgactggcagattgcggcaattctcaacatcggacagcgcgccaagcatccgttattcgtcactaatatcgacgacacccgtctcgatgacatcgcggcgtggacctatcgcgcgccggtggaagatcaggcgcgtctgggctttgctatcgcccatgcgctggacaacagcgcgccggcggttgatggcctgagccatgacctgcagggtaaagttgatgtgatcgttcaggcgctggccggggcgaaaaaaccgctgattatctccggcactaacgccggcagcatggaaatcattcaggctgccgccaacgtggcgaaagcgttgaaaggccgcggcgccgatgttggcgtgactatggtcgcccgcgcggtgaacagcgttggcctgggcatgatcggcggcggctcgcttgaagaggcgctggacgaactggaaagcggtgccgcagatgcggttatcgtgctggaaaacgacctgcaccgtcatgcttccgccgcgcgcgtcgatgctgcgctggcgaaagcgccgctggtgatggtggttgatcatcagcgcaccgcgattatggacaaagctcacctggtgctctccgcggcaagctttgctgaaagcgacggtaccgtggtgaacaacgaaggccgcgcccagcgtttcttccaggtttacgatccggcttactacgacgcgaaaaccgtgatgctggaaagctggcgctggctgcattcgctgcacagcaccgtcaacaaccgtcaggttgactggacgcagctggaccacgtcatcgatgcggcgattgcggcgctgccgcagctggcgggcattaaagatgccgcgccggatgcgaccttccgcattcgcggtcagaagctggcgcgtgaaccgcaccgctacagcggccgcacggcgatgcgcgccaacatcagcgtgcacgaaccgcgccaaccgcaggataaagacaccatgttcgccttctcgatggaagggaacaaccagccgtccgcgccgcgttcgcaaattccgtttgcgtgggcgccgggctggaactccccgcaggcatggaacaaattccaggatgaagtgggcggtaaactgcgccacggcgatccgggcgtgcgtctgattgaagcttccgccagcgggctggagtacttcacggcggttccggccagcttccacgcggaagagggcaaatggcgtatcgcgccttactaccacctgtttggcagcgatgagctgtcgcagcgttctccggtgttccagagccggatgcctgagccgtacatcaagctgaacccggcggatgccgcaaagcttggcgtcaatgccggggcgatggtttccttcagcgttgaaggccagacgctgagtctgccgctggttatttctgaagggctggccgcgggacaggttggcttaccgatgggcatgccgggcatcgcgccggtactggccggggcgcgtattgattcactgcaggaggcgcaagcatgagttggttaacgccggatcttatcgacattttgttaagcatcctgaaggccgtggtcattctgctggtggtcgtcacctgcggcgcgttcatgagcttcggcgagcgtcgtctgctcggcctgttccagaaccgctacggacctaaccgcgtgggctggggcggttcgctgcagctggtcgccgacatgatcaagatgttcttcaaagaggactggatcccgcgcttctccgatcgcgtgatctttactctggcgccggttatcgcctttacttcgctgctgctggcttttgctatcgtgccggttagcccgtcgtgggtggtcgccgacctgaacatcggtattctgttcttcctgatgatggcaggcctggcggtctacgcggtcctgttcgccggttggtcgagtaacaacaaatactcgttgctgggggcgatgcgtgcttccgcgcaaacgctgagctacgaagtgttcctcggtctctccctgatgggcgtggtggcgcaggcggggtcatttaacatgaccgatatcgtcaacaaccaggcgcatctgtggaatgtcatcccgcagttctttggcttcgtcactttcgccatcgccggcgtggcggtgtgtcaccgtcacccgttcgaccagccggaagcggagcaggaactggccgatggttaccacattgaatattccggtatgaaattcggtctgttcttcgtcggtgaatacatcgggattgtcaccgtttcagcgctgatcgttacgctgttcttcggcggctggaatggcccgtggttaccgcctttcatctggttcgcgctgaaaaccgcgttcttcatgatgatgttcattttgatccgcgcatcattaccgcgtccgcgttatgaccaggtaatgtcctttggctggaaggtatgcctgccgttaacgctggtcaacttgttggtaacggcggctgtcattctctggcaggcgcaataaggggtgaattgaacatgaccttaaaagaattattggtagggttcggcacccaggtccgcagtatttgcatgatcgggatgcacgccttcgccaaacgtgaaactcagatgtacccggaagagccggtatatctgccgccgcgctatcgtggccgtatcgtgctgacgcgcgatccggacggtgaagagcgctgcgttgcctgtaacctgtgtgcggtagcctgcccggttggctgtatttctctgcagaaagcagagaccaaagatggccgctggtacccggagttcttccgcatcaacttctcacgctgcattttctgcggcctgtgcgaagaagcgtgcccgaccacggcgattcagttgaccccggacttcgaactgggcgaatacaaacgtcaggatctggtgtacgaaaaagaggatctgctgatttccggtccgggcaaatacccggaatataacttctaccggatggcgggtatggcaatcgacggcaaagataagggcgaagcggaaaacgaagctaagccaatcgacgtcaagagcctgttaccgtaaggagaggggcaatggaattcgctttttatatctgtggcctgatagccatcctcgcaaccttgcgggtcgtcacccacaccaatccggtgcacgcgctgctgtacctgatcatttcgctgttagcgattgccggggtgtttttctcgctgggcgcttacttcgccggtgcgctggaaatcatcgtttacgccggggccattatggtgctgtttgtgttcgtggtgatgatgctcaacctgggcggcaccgagatcgaacaggaacgcaaatggctgcagccggggatctggattggcccggccatcctttccgcggtgctgctggtagttatcgtttacgccatcctgggcattaatgaccagggtatcgacggcgcggcgatcaacgccaaagaagtgggtattgcgctgtttgggccgtacgtcctggcggtggagctggcctccatgctgctgctggcgggcctggttgtcgccttccacattggccgcgaagagcgcgccggtgaggtgctgagcaaccgcgtgaacgacagcgacaaaagaaaaacggaggaacacgcatgatccccttaacacatggactgatcctcgccgccatcctgtttgtgctcggcctgactggtcttgtgatccgccgcaatctgctatttatgctgattagcctggaaatcatgattaacgccgccgcgctggcattcgtggtcgcgggaagctactggggccagactgatggtcagattatgtatatcctcgccatcagcctcgcggctgcggaagcgagtatcggtctggcgctgctgctgcagctccatcgtcgccgccagaacctgaacatcgattcagtaagtgagttgcgtggatgaacatgcttgccttaaccattcttctgccattgattggctttgtgctactggccttctcccgcggacgctggtcggaaaatctttccgccaccgttgggatggggtcggtaggcctggcggcgctggtgacggcgtacgtcggcgtcgattttttcgctaacggtaaacaggcggtcagcgtaccgctgtggaactggatgtcggtcggtgatttcaacatcggcttcaacctggtgctggatggcctgtctctgaccatgctctccgtggttaccggcgtcggcttcctgatccacatgttcgcttcctggtacatgcgcggcgaagagggctactctcgcttcttcgcttacaccaacctgtttatcgccagcatggtcgttctggtgctggccgataacctgctgttaatgtaccttggttgggaaggcgtgggtctctgttcttacctgctgatcggtttctactacaccgatccgaagaataacgccgcggcgatgaaagcgttcgtggtcacccgcgtcggcgacgtgttcctcgccttcgcgctgttcattctttataacgaactgggcaccctgaacttccgcgaaatggttgagctggcgccgcagcacttcgctaacggcagcaccacgctgcagtgggcgacgctgatgctgctcggcggcgcggtcggtaaatccgctcagctgccgctgcaaacgtggcttgccgatgcgatggcgggcccaacgccggtctctgcgctgatccacgcggctaccatggtgaccgcgggcgtgtacctgattgcccgtacccacggcctgttcctgatgacgccggaagtgctgcatttggtcggtatcgttggcgcaatcacgctggtgctggcgggcttcgccgcgctggtgcagaccgacatcaaacgtgtgctggcttactcgaccatgagccagattggctacatgttcctcgcgctgggcgtgcaggcatgggacgcagcgatcttccacctgatgacgcacgcgttttttaaagcgctgctgttcctgtcgtccggttcggtgatcctcgcctgccatcatgaacagaacatcttcaagatgggcggcctgcgcaaatccattccgctggtttatgtctgcttcctggtggggggcgcggcgctgtccgctctgccgcttatcaccgcaggcttcttcagtaaggatgagattctggctggcgcgatggccaacggtcatatcaatctgatggtagcgggcctggtcggcgcctttatgacctcgctgtataccttccgtatgattttcatcgtgttccacggtaaagagcaaattcacgcgcacgcagggaaggggattacccaccacctgccgctgattgtgctgctgattctgtccaccttcgttggcgcgctgattgtgccgccgctggaaggcgtactgccgcagaccactgagctcgctcacggtagcgtgatgacgctggaaatcacctccgggattatcgctatcgccggcatcctgatcgccgcatggctgtggctgggcaaacgtacgctggtgacttccatcgccaacagcgcgcctggccgcttcttcggcacctggtggttccatgcctggggcttcgactggttatacgacaaagtgttcgtcaaaccattcctcggcattgcctggctgctgaagagcgatccgctgaactcgttgatgaatatcccggcgattctgtcccgcttcgcaggcaaaggtctgctggtgagcgagaacggctatctgcgctggtatgtggcttcaatgagcattggcgcggtggtggtgctggctctgctgatggtactgcgttgatttgagcgcgcggttttgcccggtggcgcttcgcttaccgggcctacgaaaccgtaggtcgggtaagcgaagcgccacccgacacaacaaaccgccctcaaacgtgaatgtagtcgaattcgttgaaaatcggtcctgaacgggactttaacaaggaataaaaatcgccatgttattaccctggctaatattaatcccctttattggcggcttcctgtgctggcagactgaacgctttggcgtgaaactgccgcgctggatcgcgctgattaccatgggactgacgctggtgcttggcctgcagctgtggatgcagggcggctattctctgacgcaatccgcggggattccgcagtggcagtcggaattcgtgctgccgtggatcccacgtttcggcattagcatccatctggcgattgacggtctgtcgctgctgatggtggtgctgaccggcctgctcggcgtgttggcggtgctctgttcctggcgcgaaatcgaaaagtaccagggcttcttccacctcaacctgatgtggatcctgggcggcgtcatcggggtattcctcgccatcgacatgttcctgttcttcttcttctgggaaatgatgttggtgccgatgtacttcctgatcgcgctgtgggggcacaaagcctctgacggtaaaacgcgtatcacggcggccaccaagttcttcatctatacccaggcgagcggtctggtgatgctgatcgccattctggcgctggcattcgtccacttcaacgccaccggcgtgtggaccttcaactatgaagagctgctgaaaactccgatgtctcacggcgtggaatacatgctaatgctcggcttcttcatcgccttcgcggtgaaaatgccggtagtaccgctgcacggctggctaccggacgcccactcccaggcgccgacggccggttccgtcgacctcgcgggcatcttgctgaaaaccgcggcctacggtctgctgcgctttgcgctgccgctgttcccgaacgcctccgccgagtttgcgccaatcgccatgtggctgggcgtgatcggtatcttctacggcgcgtggatggccttcgcccagaccgatatcaaacgtctgattgcttacacctccgtttcccacatgggcttcgtgctgattgctatctacaccggtagccagctggcttatcaaggggcggtgattcagatgattgcccacggtctgtccgcggcgggtctgttcattctgtgcggccagctgtacgaacgtctgcacacccgcgatatgcgccagatgggcggcttgtggagcaaaattaaatggctgccggcgatgtcgatgttcttcgctgtcgccaccctggggatgccgggcaccggtaactttgtcggcgaatttatgattctgttcggcagctataaagtggtgccggtgattaccgttatctcgacctttggtctggtattcgcttccgtttactcgctgtcgatgctgcatcgcgcctacttcggtaaggcgaaaagcgaaatcgcgacgaaagagctgccggggatgtccctgcgtgaactgtctatcatcctgctgctggtggtgctgctggtgctgttgggcttcttcccgcagccgattctcgacacctcgcatgctgcgatgagcaacattcagcagtggtttgttaattctgtttctactacaaggccgtaattcgccatgacaataactccacaacaactgatcgcactgctaccgctgctgatcgtcggcttgacggtggtggttgtgatgctctccattgcgtggcgacgcaatcattttctcaatgccacgttgtcggttctcggactaaacgccgcgctggtctcgctctggtttgttggtcagaacggggcgatggacgtcaccccgctgatccgcgttgacggttactcgatgctctataccgggctggtgctgttggcgagcctcgcgacctgtactttcgcctacccatggcttgagggttacaaggacaataaagaagagttctacctgctggtgctgatcgccgcgctgggtggcattctgctggccggcgccaatcacctggcctcgttgttcctcggtatcgaattgatttcgctgccgttgttcggcctggtcggttacgccttccgccagaaacgttcgctggaagcgagcatcaaatacaccatcctctccgcggcagcctcgtctttcctgctgttcggtatggcgctggtgtatgcgaattccggtaacctgtccttcctcgcgctgggcaagagcctggctgacaacgcgctgcacgagccgcttctgctggcgggcctcggtctgatgatcgtcggtcttggctttaaactgtcgctggtgccgttccacctgtggacgccggatgtataccagggcgcgcctgcgccggtatccaccttcctggcgaccgccagcaagattgccatcttcggcgtggtgatgcgtctgttcctgtacatgccggtgggcgacagcgaagcggtacgtgtggtgctgggcctgatcgccttcgcctctatcatcttcggtaacctgatggcgctgagccagaccaacattaagcgtctgctcggttactcttccatctcacacctcggctatctgctggtggcgttaatcgccctgcagagcggcgaaatgtcgatggaagccgttggcgtctacctggccggttatctgttcagcagcctcggcgcgttcggcgtggtcagcctgatgtccagcccgtaccgcggtccggatgctgactcgctgttctcctaccgtggtcttttctggcaccgtccgatcctgtcggcggtaatgacggtgatgatgctgtcgctggccggtatcccgatgaccctcggctttatcggtaagttctacgtgctggccgtcggtgtgcatgcgcacctgtggtggctggttgccgcggtcgtgatcggctcggcgattggtctctactactatctgcgcgttgccgtcagcttgtacctcagcgccccggagcagttgaaccgcgatgcgccgtcaaactggcagtacagcgccggcggtatcgtagtgctgatctccgcgctgctggtgctggtgctcggcgtgtggccgcagccgctgattagcatcgtgcagctggcgacgccgctgatgtaatctgcgctataaataaaaaaccgccgacttgtcggcggtttttttatgcctgcggtttacgccagccgatagaccataaaatcttccgccagtagcgtattggcgaaaatctcccggcattccgccagcatacgcaggcagccttcggcatcgtagcgcgagctaaagtgggtggcgattagcgtgccgacccccgcttctttggcaagcgccgcggtttgctgactggaagagtggccacggctattggctttctccgccatcgcctgctcaagcgtggtttcgtggactatcacatccgcgccgcgcgccatctccagcgcctgcgggcagggggcggtatcgccaaaaatggccagcgttttacccggcgtcgatggtcccagatagcggctaccgtcgatgacccggccatcttccagttcaacacgctggccgagcttgagctgatggaacagcggccccggacgcacgccatcggcaatcagttgggcggcatcgagcgttccgggcttgtcatgctgttcgatgcggtagccgtagcactccaccggatgactgagcgggtacgcgctgacccgatagccatcttcgtcgaagaccaggccggggccgacttcgatgatagtgagcggataatcggtccatgagccgctcaggcgcagcgcggtttcgatgaattctttaatcccttttggcccgtaaaccgtcagcggcagcgagtttccctgcatcgagcggctgcacaacaggccgggcaggccgaacagatgatcgccgtgcaggtgagtgatgaaaattttattcagtttgcctgggtggtaaggggtatggagaaactgatgctgggtgccttcgccgcagtcaaacaaccacatttcagcgctggtgggttgttgcaaattcagtattatcgacgtcatattacgcgtacgggtcggcacgccggcggatgtccccaaaaatgttaattccatcgtccagtgtcctcaggcgagtggtaaagcatcagtatatcaataaggagtcacaaatgatgacctggcaggatttacatcacagcgagctcaccgttgctcaactgtacgccttgctgaagctgcgaagcgcggtgtttgtcgtcgaacaacgctgcgtctatcaggatatcgacggcgatgatttagtcggtgagaaccggcatctgctcggctggcgcgacggagagctggtggcctatgcgcggatcctcaaaagcgaagaggagttcgaaccggtggtgatcggtcgggttatcgttagcccgtccgtgcgcggcgagaagctgggctaccagctgatggagcaggcgctggccagctgccggcagaactggccgcagaaggcgatttatctgggggcgcaggcgcatttgcagaaattttatgccagctttggttttgtgccggtgacggaggtatacgatgaggacggtattgcccatatcggtatggcgcgtgacatcacaactcattaagaagctaaatagtaatagcgtatcgctatcaattatctatacttttcctcctgtagcgaatccagtggctggcgttcgccgggcctgttaaggttcgctccctcatgatgggtactgctatttatcgcagctaccctttataatgtggggtttttaatttcgtggaggttcgcgtgctgtctgtttccaccgcgctggaaagcctgctgggctgcctggctgaagatttccctccgtcacccggcacgcgaatttttgatatcccattcccgttaaacgacgccttcgacccgttactgtggtgcgcgcatcagccgtgctggccgcaattctactggcagcagcgtaacggtgatgaagagctggcggcgctgggggcagtaaccacctttgcctctttgtccgcggcgcatgattttttatgcgcccaggggcgggaagatctgcgcatcagcgggctgaatgcgttcgacccgcagcagggtcatctgtttctgccgcggctggagtggcgccgcctgggcggcaaagcgactttacggctggtggtacacagtgtgacctcgctgcaagacgacgcggccgccgcgcgggcgtttctccaatcattaaatagcgagcaggcgacggcggcatcgatgccgccgctgcaaagcgagcagcatgcgccggaatacccgcagtggcgcgagctgattacgcaggcgacgcaggtaatcggcgccggcgaaatggataaggttgtgctggcgcgggtcacggatttacgctttagcgcgccgctgcaggcgtttgccattatggcggccagtcggcgcagcaatcttaactgttttcacttcctgatggcctttagcccacagcaggcgtttctcggctccacgccggaacggctgtggcggcgacgcggcgcgctgctgcgcaccgaagcgctggcgggcaccgtcgctaatcatcacgatgacgcccgtgcgcagcagttggccgattggctaatgaaagacgataaaaaccagcgggaaaatatgctggtggtggaggatatctgccagcgtttgcagggcgagtcgccgacgcttgacgttctgccgccgcaggtcgtacgcctgcgtaaggtgcagcatctccggcgctgtatctggtgcgaactggctgagcccgacgacagccgctgtctgctgcagctgcagcctaccgccgcggtggcggggctgccgcgccaggcggcgctggcgttcatccgccgccatgagcctttcacccgcgaatggtatgccggctccgcaggttatctttcactggcgcaaagcgagttttgcgtggcgctgcgttcggcaaaagtcgaaaacgacaccctgaggctgtatgccggggccggtattgtcagcggatctgacccgcagcaggagtggcaagaaatagaaaataaagcggcgggattacgaacgttattactttcagaaacgtagagagacgacgtatatcaaaacggcgcaactctgccttatctatacttagcatcaatatttgataccggacaatttcatgtcagtaagcgcatttaaccgacgctgggcggcggtgatccttgaagctttaacccgccacggcgtgcagcacatttgcattgccccaggctcgcgctcgacgcccttaaccctggcggcggcggaaaaccgcgcttttattcatcatactcattttgacgaacgtggtcttggccacctggcgctgggactggcgaaggccagccgccagccggtggcggtgattgtgacctccggaaccgcaactgcgaatctctatccggcgctgattgaagcgggcctgactggtgaaaaactgatcctgctgaccgccgaccgcccgccggagcttatcgactgcggcgccaatcaggccatccgccaaccgggaatgtttgcttctcatcctgcgcagaccgtttctttaccgcgtccttcgcaggatatttccgcccgctggttggtctcgaccatcgatcaggcgctgggcgagctgcatgccggcggggtgcatatcaactgcccgttcgctgagccgctatatggcgatatggacgatagcgggctggagtggcaacagcagctcggcaactggtggcagagcgataagccctggctgcgtcaggcgctgcagatggagagtgagaaacagcgcgactggttcttctggcggcaaaaacgcggcgtagtggtcgcgggcaggatgagcgccgcggaaggtaaaaaagtggctgaatgggcgcagaccctcggctggccgctgattggcgatgtcctgtcgcagaccgggcagccgttgccgtgcgccgacctgtggctgggcaacggtaaagcggtcagcgaactggcgcaggcgcaaatcgtcgtgcaactcggtagcagtctgaccggcaaacgcgtgctccagtggcaggcgacctgcgagccggatgaatactggctggtggataatctgcgcggtcgcctcgatccggcgcagcaccgcggtcgccgtctgctctcaagcgttgagcgctggctcgaattgcatccggcggagaaacgccagccgtgggcgacggtgatcccgcagcttgccgggcaggcgtggcaggccgccgtcgccagcaacgagccttttggcgaagcgcagctggcgcagcgcattcggcgctatttgccggatcagggacagctgtttgttggcaacagtttagtggtacgcctgatagacgcgctggggcaactgccggcgggttatccggtctatagtaatcgcggcgccagcggcattgatggcctgttggcgaccgccgccggcgtgcagcgggcgagcgcccggcctacgcttgcgatcgtcggcgatctttcggcgttatacgatctcaactcgctggccctgctgcgccaggcgtcggcgccgctggtgctgattgtggtcaataataacggcgggcagattttctctatgctgccgacgccgcaggacgagcgccgccagttctatttaatgccgcaggacgtggatttcagccacgcggcggcgatgttcggtctggcttatcaccgccctgatgactggcagtcgctggatgaggcgctggcaggcgcgtggcgccgcgccggggcgacggtaattgagctggcggttaacgagaccgatggtacgcagactctccagcaactgctggcgcaggtaagtcgcctgtgacgctcaacgcggcggttgaaagcggccagccgggttatccctggttggtattcctgcacggcttttccggagaccgcgacgagtggcgtacggttggcgaagcgtttccggcctggccgcggctgtatctcgatctgccggggcacggtggctcggcggatatcgcggttgatggctttaccggggttagcgaattactgcaggctacgctaaatagttacaacatcctggattactggttggttggctactccctgggcggccgggtggcgatgaacttcgcctgccagccgcgcgcgggcctgcgcggcctgatcgttgagggcggacatccgggcctgcaggacgaagcgtcgcggcaggcgcggcgcggcaatgatagtgcctgggcggaacgttttcgccgcgagccgttagcgcaggtcttcgccgattggtatcagcagccggtcttcgcttcgctgaatgcggcgcagcgcgcgtcattggtcgccctacgtcgccgcaataacggcgctacgctggcggcgatgctggaggcgacctcccttgcccggcaggccgatttgcgcccgtctctgcaggctcgcgattttccttttcactacctgtgcggcgaacgcgacgccaagtttcgcgctatcgcgcaagcgctcgccgccgatacccatatcattcaccatgccggacacaacgcgcaccgggacaaccccgaggcggtgattgcctgtctggcgcagattctggcaagttaactgaaggacattctatgatctctcttgatgaagcaatgctctacgcccccgttgaatggcacgattgctcagaaggctataccgatattcgttatcaaaaatcgactgacgggattgctaaaatcactatcaatcgtccgcaggtgcgcaacgccttccgtccgctgaccgtcaaagagatgattcaggcgctggcggatgcccgctatgacgacaatatcggcgttatcgtactgactggtgaaggcgataaagctttctgcgccggcggcgaccagaaagttcgcggcgattacggcggctatcaggacgactccggcgttcaccatctcaacgtgctcgacttccagcgccagatccgcacctgcccgaaaccggtagtagcgatggtcgccggttactctatcggcggcggccacgtactgcacatgatgtgcgatctgaccatcgcggcggacaatgccatcttcggccagaccgggcctaaagtcggctcctttgatggcggctggggcgcttcctatatggcgcgtatcgtcgggcagaaaaaagcgcgcgaaatctggttcctgtgccgtcagtatgacgcccagcaggcgctggatatggggctggtgaataccgtggtcccgttggcggatctggaaaaagagaccgtgcgctggtgtcgtgaaatgctgcaaaacagcccgatggcgctgcgctgcctgaaagcggcgttgaacgccgactgcgatggccaggccgggctgcaggagctggcgggtaacgccaccatgctgttctacatgacggaagaagggcaggaaggacgtaacgcttttaaccagaaacgtcagccggacttcagcaaatttaaacggaatccataatgcgcgtttcgcaggtttaccgctggcagataccgatggacgcgggcgtggttctgcgcgaacggcggttaaaaacccgcgacgggctgttcatccgtctgcaggagggtgaacgcgaaggctggggggaaatttctcccctgccgggattcagtgacgaaacgctggaagaggcgcaaatggcgctgctggcgtgggcgcgggcctggcgcgacggcgctgagccgccgcttcctatgcagccctccgtcgcttttggtattagctgcgcgcaggcggagcttggcggcgagctaccacaggcggcggattatcgcgcggcgccgctctgttccggcgacccggatgaactgttcgccaaactggcggcgatgcccggcgagaaagtcgctaaggtgaaagtagggctgtgggaggcggtacgcgacggcatggtggtgaatctgctgctggaagcgatccccgacctgcagctgcggctggatgccaaccgggcgtggacgccgatcaaagcgcagcagttcgccaaatatgttaatccggcctatcgccaacgcattgcctttctcgaagaaccgtgcaaaagccgcgacgattcgcgtgaattcagccagcagaccggtattgctatcgcctgggatgaaagcctgcgcgaggcggatttccgttttgtcgccgagcccggcgtgagcgcggtggtgatcaaaccgacgctgaccggcagcttacaaaaggttcagcaacaggtcgccgcggcgcatgcgctggggctgagcgcggtgattagctcgtcggtcgagtccagcctggggttaacgcagctggcgaggatcgccgcctggctgactccgcagactatccccggactcgatacgctggcgctgatgggcgcgcagctggtgcgggcgtggccggagagtacgctgccaatattcaatgctgatgagctggagcaactgctgtgatgttttccgattggccgtggcgccactggcgtcaattacgcggcgagtcgcaggcgctacgcctgaatgaccaggcgttgacctggcgtgagctatgcgcgcggattgacgcgctggcatctggttttgccgcgcagggcgtaatggaaggtcagggcgtggcgctacgggcctacaaccagccggagacgctactcgcctggctggcgctgctgcagtgcggggcgcgggtgctgccgcttaatccgcagctgcctatggcattgctgcaggaactgttgcctgcgttaaccatacagcatcaactggtgcttaacggtgatacgctgccggggaatttaccggcgttaactctgcaggcggcagaaggcgcttgtgccgtttgctggcatggcgaacggctggtgtcgatgacgttaacctccggctcaaccggcctgccgaaggcggcggtacatagcgccagcgcccatctggccagcgccgctggcgtactggcgctgatgccgtttgccgcggaagacgactggctgctgtcgctgccgttgttccatgtctccgggcaggggatcatctggcgctggctgctggctggcgcgcggctgacggtgcgcgatagacaaccgctggagcaggcgctgcggggctgtacccatgcttcgctggtaccgactcagctatggcgcctgctaaatggcgatgtcgatgtttcactcaaggcggtgctgcttggcggcgcggcgatccccgtcgagctgaccgaaagggcgcgagcgcagggaatacgcagcttctgcggctacggcctcaccgaattcgcctccacggtctgcgccaaagaggccgacggagcggcggatgtgggcgaagcgctgccgggacgggaggtaaaaattgtcgccggcgagatctggctgcgggcggcgagcatggccgcaggctactggcgcgatggtcaactgctgccattaaccaacgatgaaggctggtttgcgacgcgcgatcgcggagcgttacgtgccggtcggctgtcggttattgggcggctggataatctcttttttagcggcggcgaaggcattcagccggaggaggttgagcgcgtgatactcgcccatccgcaggttcagcaggtgtttattgtgccgcaggatgatatcgaatacggccaacgcccggtggcggtggttgaatgcgaggatggctgcgaaatggccacgctggtggcatggagcgctgaacggttagcgcgtttccagcagccggtacagtggctacggctgccggaaacgttaaagaacggcgggattaagatttcgcgccgggcgctgcgcgaatgggtcaattcgccggtttagccgatattagcctcggcgcggcgctggcgctgtttacgtctcagacgcagcagcggcggtaccaccaggacggcgacagccaacatcagcaatgttttggttacgccgctttcccagaggatagccagattaccgttgctgatcgacagcgcgcggcgcaggttctgctccagcatctcgcccaatacaaaaccgaggatcagcggcgacatcggaaagtgcattttacgcatgatatagccgagcacgccgaggccaaccatcagcaacaggtcaaaggtggtgctatgcaccgcatagacgccgacggcggaaacggcggcgatggccggtaccaggaaccatagcgggatcgtcagcatgcgggtgaacaggccaatcagcggaatgttcataataagcagcatcacgttggcgataagcagcgcggcgatgagcccccatacgatatccggctgttcggtgaacatcgccgggccgggcgtaatgttatatagcgtcagcgcgcccatcatgaccgcggtggtgccggaaccaggcacgccgagcgtcaacattggaataaacgaaccgcaggcggaggcgttattcgcggcttccggcgccgctacgccgcgaatatcccccttgccgaagttatcgctattaccactgatttttttctccgtcatataggtgatggcgctggcgatggtcgccccggcgccgggcagaataccgacgaagaaacccaccacggaagaacgcagggtcgcgccgacgcactgcgcggcctctttggtgttaaatagcatgcgcccggttttacgcaccagcgtttgcccgccgctggtgctctccagcatcaacagaatctcggaaacggagaacagaccgataaccaccactataaactgaacgccatcggagagatggacgctgtcgaaggtgaagcggtaaaccccggtgttggcatccacgcccaccgtcgccaggcccaaaccgattaacgccgcgaggaacgacttcagcgggttttgcgccatcatgctgccgaggcaggcgatggcaaacaccatcagcgcgaaatattccgccgggccgaacgccagcgaccactgggcgagaagcggcgcgaatagaataataccgccgatcgcgataagcgaaccgaagaaagagctgacggcggaaatcgacagcgcgacgccgccgcgcccttgctgcgccatgggatagccatcaagcgccgtcatgatggcggcggcatcgccgggtacattcagcaggatagatgaaatacgcccgccatattcacaaccgatatagaccgtcgccaacaggatcagcgccgattccgcgggcaagtgcagggcaaaggccagcggcagcagaatggcgacgccgttaatcggcccaaggccgggcagcagcccgacgatggttccgacaaagcagccgatgagggcgataagcagattttccggcgtcatggcgacggcgaaaccctgcgacagatagatccaggtatccataagcttctccgttaatttaaccagacgccaagcggcagagtcacatcaagtaaggtatcgaaggcgtaccataacgagacgcccatcaccacgccggcaatgcctgccgccggtagcgtggcgccgaatagcaggccgatcaccgccgtcagcagcgcggtcgccagcggaaagcccagccattcaaatccccaggcatagaccaccagcaccacgaccatggttaacagccgttgcaggacatgtcgtcccggccactcgatggcgtccgggcgacgcagcagcatcagcgcagaacacagcagcatcaggccgataatgcccaacgggaaagggcgcgggccgacgggttcatacgagtattcgctgtggatctgccaggcgataaacaggccgccaatgcataacaacagccagactccggcaaagatacgatcgctcattagcgcctccgcggattatttagccaggccaaaggctttcgcctgttcgcgataatcgctgacctgctgttttacataggtatcgagttccttgccgttcatgttgaattcaaacaggccgcgcagttcacgttgctttttgaactcatcggtttgctgcagtttagtgaattcatcaacccaccactggtagtcggcatcgcttactttcgggcccataaagaagccgcgaataatcggccagaccaggtcatagccctgctctttagcggtaggaacatcagccagcgcgcccggcagacgttcgttggagaagaccgccaggacgcggatcttatttccctgcaggtacggcaccatttcacttagatcgccggagaccgcctgcacatggttgccgagcagggcggttaccggctcgccgccgccctcaaaggcgacgtagcgcatcttgtgcgggtcaacgttggctttttgcgccagcagcgccgctttcatccagtcctggctgccgatggaggccccggcgccaatgacgatagtggcgggatttttctccattgcgctcatgaatgacttcaggtctttccatggcgaatcggcgcgcacggcaatcatgccgtagtcggtaccgacgctggccagccagcgcacgtcatcaacgccgtagcggccgaatttcccctgcgacaaattcagcagcgagccgccggaaaaagcgaccacggttccggcctctgccgggcgctgggcgacgatggcgttgtaggccaccgcgccgacaccgccgggcatataggtaacgcgcatcggtttctcgatcgcgccagtttccatcaggctcacctgaatcagtttacaggtgaggtcaaagccgccgccgggtttggcgggggcgatacattcggtgcgggacggggcttgcgccgcgaaagcggtggttgtacagaggcacagcgcgatggcgctaagatggcggaaaaatggcgttttcataggcttcctcagtaggtacagggaatgtttttctgattatgtgaaccgacatgtggcgattcggttgcgtgattgttaaaacagttacctttcatttccctttcaatgcggcagcaactttacaggatgtgatatgcgtctcttattagccgaggataaccgtgagctggctcactggctggaaaaagcgctggtgcagggcggttttgccgtggattgcgtttttgatggccgggcggcggatcacctgctgcaaagcgaaaaatatgcgctggcggtgctggatatcggtatgccgggcttagatggcctcgaggtggtacagcggttgcgtaagcgtggacaaacgctgccggtgctgctgttgaccgcgcgcagcgcggtagcggatcgggtgaaagggctgaacgtcggcgccgacgattacctacccaaaccttttgagctggaggagctcgatgcccggctgcgggcgctgctgcgacgcagcgaagggcaggtgcatgaggtgcagcagcttggcgatctggaatatcgcgatgaaggctattttctgctgcgtggtgagatgttgtccctgacgccgcgcgagctggcgctgttgaaagtgctgatgtttcgccgtacccgtccggtttcccgccagcagctatttgaacaggtgtttagcctcagcgacgacgtcagcccggaaagcatcgaactttacattcaccgtctgcgcaagaagctccagcagagtaacgtgcgtatcactacgctacgcgggctgggttatctgctggagtgtgagccgcatgaaatggggtaaaccgcagtcgctgtatgcccaactgctgctgttcctcggcctgccgctggcgctgttgtgggggctatcggcattcaatagctacgtgagcgcgctgcaggcggcgacgcaggcctacgatcgtacgctgctctcctcggcgcgcaccgtggcggagcggctggtagtgcgcggcggccatctggaggtcaatgtgccctgggtggtgctggacagctttgaactcaacatgaacgaccggctgtattacaaggtggtcgacccgcaggggaaagtgatctccggttttgacgatctgccggcgatgccgccggccacgtcacgaacccagctctatccggcgctggcatggttttatcataccgaataccgcggccaggccatccgcgtagcgcgcctgctgcagccggtcaacgaaggcggcatcgtcggaatggcggagatttatattgccgaaacgctgcagtcgcggcgctggctggccggacaactgctgttttcatcctgggtgtcacagggcttattagtgctgttgacgttggtactggcggggtggctactgcgccgcgttctgcggccaatgcgtcagctctcggcgctgatggtgcgccgcgaacccggcctgctgacgccgctaccggaattgctgccgtggtcggaaacgcggctgctgatcgtggcttttaaccgctatattgaccgtctgcgggtgatgatctcccggcaagagcgctttagcgccgatgcctcccatcagttaaaaacgccgctggcggtcctgaaaacccaggcctcggtggcgctggccagcgacgatccgcagctgtggcgcgagagtttgcaggccatgcgcgcgacgctggatgatacgattttactcaccgaacgtttgttgcaactggcgacggtgaaacgccgggagcagggcgagcaggcgtttgtcgcggtcgatctgcaggaggtcgtgcaccatagctgtttttcgcgtattgcccaggcgcgtagtaaaaacatcgatctgggttatgagggcgaacagtcgccggtgaacgttttgggggatggcgttttgttgggggaactgtgcgccaacctgctcgacaatgcgattcgctacactccggcacgcgggacggtgacgctgagcctgcatcgcgatggcgaagccgtcacgctgagcgtggaggatagcggcccgggcattgatgaaaacctgattaaccaggcgctgacgccgtttcgccggctcgataacgtcggcggcatacccggcgccgggctgggcctggcgctggtaaacgatattgcgcgtctacatcgtagccgcccgcagctgtcgcgcagcgaaagcctggggggattgaaggtgacgctgcgtctgttgaccgtggtttaaagcagccctttctggctgagggtgaggcgggtcgcggcattaagatcgtaatgttgcaggtcttcgcccttcacccaggcgtaatcgtcgaattcctcgttgatcgtgacctcgcggttggcgcttatgcaatcgaaaatcaaatagatcatgtagatctcttcctggcgaccatcggcataggttttcacgcgggtatcatcgcggaagctccatggcgtgatgcgggtcaactgtaatttttcgccaagctcctcgcggacttcacgtcgcagcgcctcttcaatagtttcccccggctccacgccgccgccggacagcgcccactgtccgggaaaaaccccgcggtcggcagccatcttgcacaacaggtaatggccatcattttggattagcgggcaaacaatcgtcctttgacgcatgatttttctccttcgcagtgagtcgggccaggtatcgaggaaacagtttgcgaggcgcctcggcaaaccgcaagggaaatacggcgctggtggcgaagctgacggggcttgcgccggagcgtctggcgctgctcacccattaatttttctgcttccttcaaacggcctgcgcgacggcgatcgcgcaggttaatatagatttatttaatcaatgcaacttaattaaatataattccgctgaatttgaattcggtggaatttactttctttcgcaaatgcgcggcggtattgctgtaaaaagacgcaactggttacactcttgtgaaaaatcatttcgccaggtcattgattcctgacgggtgcgcagtagaattttcaggttttttcgggacttctttgattcttcttttctggatagagtaaataatgaaaaagagcatttttatggccctggccggggtaatgatggtttcctcggcggcccatgctattagcgttaccggcgaagccggcgagcactataccaacctcggcgttggcttcggtaccgaatccaccggcctggctatttccggcaactggttgcacagcgataacgacggcgacgccgcgggcttaggcctgggtctgaatattccgctgggaccattcctggcgaccgtgggcggcaaaggcatctacaccaatccgaagcagggcgatgaaggttatgcggccgcggtcggcggcggcctgcagtggaaaatcggcgatagcttccgtctgtacggcgactattactactcgcctgattcactctccagcggcatcgatagctatgaagaagcgaacgttggcgccagctggaccatcatgcgtccgcttagcatccaggcaggttatcgctacctgaacctggcgggcaaagacggcaaccgtgataacaccatcgccgacggtccgtacatcggcgccagcgccagcttctaatcctccggcgcggccttccgccgcgccaaatttcttcgtcgccagcccgcgcctttgcgctatagtaattcgacttatcaggctggagttcataatgctacaagtggaaatgctgtccaccggcgatgaagtgctgcatgggcagattgtcgataccaatgccgcctggctggcggattacttttttaatcagggtttaccgttaacgcgccgcaataccgtcggcgatgacctcgacgcgctggtggctattttgcgcgaacgcagcgaacaggcggatgtgctgatcgtgaatggcggcctggggccgaccagcgacgatcttagcgcgctggcggcggcgacggcgaaaggagaaggtttggtcctcaacgctgaatggctggagacgatgacacgattctttgccgagcgcggtcggccgatggcggaaagcaatcgcaagcaggcggaaatccccgccagcgccgaaatgatcaataacccggtgggcactgcctgcgggttcgccgtacagctcaaccgctgcctgatgtttttcacccccggcgtgccgtctgaatttaaagttatggtcgagcaggagatcgtaccgcgtttacgtgcgcgcttcacgcttccgtcgccgcctgtctgtctgcgtttaaccaccttcggacgttcagaaagcgagctggcgcagagccttaatcacctgcagctcccccctggtgtggtgatgggctatcgctcgtcaatgccgattatcgagctaaaactaaccggtcctgccgagcagcgcgatgcgatgctggcgctgtggccagaagtgcgtaaggtagccggagagagccttatctttgagggcacggaagggttaccggcgcagatcgcgcgctgcctgcaggagcgtcagcttagcctgaccttgagcgaacagtttaccagtggcctgctggcgctgcagctgaggcgggcgaacgcgccgcttctcgccagcgaagtggtgccggcgcaggaggagaccttagcgcaatcggcgcgctgggccgccgagcggcgcgttaaccattttgccgggctggcgttgtcggtcagcggtcaggaggccgattacctgaactttgtgctggcgacaccggaaggtacgcacgcgctgcgggtcaagttcagcgtgaatcgccacgggctgtcggtgcggcaagaagtctgcgccatgatggcgctgaatatgctgcgccgctggctcgacggtaagccggtcagcggcgagcatggttggatcaacgtcgtcgagacgctgtttatcgactgattcaggcaggcgcccccagcgcctgcgccagcagagtaatgggatgttcgcagcgcttgctggtggacatctcaatctgccatttgcaggtttcgcaatcagtaatcactacgtccgcgccgctctcctcaatctggcgaaataatggcgcgccaattgcctgcgccgatgaatagttttccgacttaaagccgaaggtgccggcgataccgcagcactgcgaatccagtacttccagctgtaggcccgggatttggcgcagaagctcaagggtgtatagcgaccagcccattttttccatatgacatggggtgtgatagaccaccttcagcggcagcgggcgcaatggaagggttttgccggcatcgagctgtttccaaatccagcgggtcgctaactccacccgatcccgcagatcgctgttatcgatatccaggagatggggatattcatcgcgcagggtaaaagtacaggttgaagaggtggcgatgatcagcaagctgttttcgcgcatggcggcgacgttgctgcgcgcttgcttgcgcgctttgtcaaaaaagccgttggcgataagcgggacgccgcagcatttttcttttgataagagctgcacgccggtacccagcgtgttgacgacgcgaatcagatccttacccaattgcgggtggttatagttgacgtagcagccatggaagaaagccacctgctcgctgtactgcgcctgtgcggcggcgagctggcggtaagcgcggcgaaaggtgccgaagccatatttcggcagcgtgcggcgatggtcgattttcagcgccgcgtcgagcaggcggcgcaccggttttaagcccgttgtggcgttgaccagcggcgcaaaaggcgtggaaagggtgcccatcagatcggtatggctgaggatggcatcgcgcagggttggtgtttgctggctgtactgcgcacgcgcgcgttgaataatatcgccgattttcacatcagatggacaggccacctcgcagcgtttgcaattaatacaatatttcagcgcatcgtcgtacagcgcgccatctttcagacgcagacgttcgccgtccggccccgcctgtttcgggccgggatagcgcggattcacccggctcaccgggcaggcggtggtacagaccgtgcattttatgcagctttcaaagcgggtatcgttcatgaccggcctcctgcaagggcgtggatctgtctggcggcatgcagcgcggtgacggcgcaaacgccgccgccgcagccgagttgaatggcatcgaaaccgccgagcagcgagccgatagcgaaaagattcgttagcggctggccgagcaggtgtgggcgcagcatagggtcggtcttcaaaccaaagcgctgccacggttgtgatgcgaagaaatcacgctgataccagctatcgcgcgccagcgtttgctgcagatcgaggccgagaatcggttcgcgcacgctatcacgggtggcgacgagaccgttactgaaaaagctaccgctcgccaacacggtaaagcgcggacgcagtgcgatatcgccgtgatttcgcgtccagacggcctcgacggcgccctgctgatggctgattttcaccacctcgtcaccggcaagccaggtgccgccggtgcggatgaactggcgctgaagctggctatgcaggcgcatccccggcaccgaaggcggcagcgtcggcagcaggcgcagcgggcagggcagatgttcttgtagccaatgccagaggcgattatccgcgagcccaaaacaggcgggcattatcagcagctggtactcttgcgccagcggcagcagcgcggactgcagggcaggccacaggttttcatcatcaagcacgcgggcgatgttagcggcacggaactccgtagggttatcgcgcagcacatcaagcagctgtaaatcaatctccgccgcggcggcatccactccgctctgtccgagggcggcggcggccagatgcggctgaaaatcggcaaaaccgctaatccccaccatgcatacgcgttgctgcgcgatgggcgccagcggaacctcttccggcgacagccacgccgggcgcaacgtccccagcggcgttacccgcaggtgcggtcggcgcgcttcgccttgcatgttcgcgccgcaggcggccagcagcgcttcggtctgtctggcgtattcgagcaccgcgtcggcgccgaggcgggagtaggggtgttcaggaagctgaacggccagttgctgaagaccttgtgcgacatcagtgacggtatcgccgttcggcagcgccgagagcaggtctaatgaagcagaggaaaagtgcagtgcgctttgcccacggctgattatcacgcagcgcaggccgtgttgattcagcgccagcccgcacaacagcccggccagtccgccgccgacgatggcgcaatcaaatttcatcctgatgctccttttgcagtccgcataagccgaggtagacccagcgggtaaattcactttcgcgcagcgcgtcgccccaggcgatgggctgaacgcccttccagcgctcattgagaaattccgacagctgagttaacgactgcgccggggtggcgacgttaaagcgctgtagcagcccggcggcgcggcaggcgcacagttcaccctggcaggtgcccatgccgacccgggtacggcggcgcaggtcgagcagattcttcaccgccagattctctaccgcgtactgcacttccccggcggtgaccgcttcacattcgcagaccaggctacggtgctggcggctgtcgccgagccatgctggggtgcggtcgccgtggcgatacaccgccgacccgcgcagcggcgtcggtagcgagataatctttttcagcgtggtttctgtggcttcctgcgaacccggtagcgggcgctccgcggtgcggcacggctcagcattgccgagtttgcggcagacggcgtcgctggcccattccgccatcaaacggtaggtcatcaacttaccgccggtgatggtgataaagccttccataccgtcgcgcggggcgtggtcgagcagcacaataccgcggctgacgctgcgcccgctgggatcgtcatcgctggcgaccagcggacggacgccggagtaggcgcgcagcacccgggtgcgccccatgatcggcgccagtttttcaccttcgcgcagcagcgtatcgacctcttccgtcgtcacccggttatcgtcaatttcgtcataaggaatatgcgtcgaggtggtgccaatcaacgaaatggtatcgccgggcaccagaatatcggcatccgccggcttgcggcagcggttaatcacctggttattaatgcggtgatcgaggatcagcagcgagccttttgccgggaacatggagatgcgcagatcggcgtactccgcgatgcgttggccccagatcccggcggcgttgacgacgacctgtgctcgaatgctacgcgcttcgcgccgttgatgatcgtagatctgtactccgtacacgcgatcgccctggagcagcaggccggtgacctcgcagccggtaaggatctgcgcaccgtgttcgcgggcgtcgagcatattggctgccgtcaggcggaacggatcgacggtgccgtccggtacttgtacggcgccaagcagcgtagggttgaccgcgggttccagacgcaatgcttcagcggggggaagcggtttagcatcaataccggcctgctgacaggcgtggataaaggtttgctgccaggccatgtcatcttcaggcagggtgataaacagcccgttggtgggttcaatgcagtggcgggcgatgcgacgtaaaatgcgattctcgctgatacattcgcgcgcggattcgctatcggtgacggcatagcgcgcgccgctgtgcaacagaccatggttgcggccggtggcgccggtggcgatatcgtgccgctcaatcaacgccacacgtaacccgcgcagggcgcagtcgcgggcgattcccgcgcctgtggcgccgccgccaataatcagcgcatcaaattcttgcgtctcggccatcttccggtcctctactttcgttttacaccatttagccatatcaatagtgtggaatgtttgatttcgagcatatttgcgcgcaattcgagcgtttgctgtgattttgtgctcacattggaaaattttgtcatatatctgtaacaaaatgtgcgatatttcacagtattagttctacgctttgcctaccatcgcgacctaattagaagtacgtgaataaattagattttttgcgtcgatgtcagtgaaacagcaatggccacggaggctgatatgttaagtatttttaaacccgcagcgcataaagcgcgtttgccggcggcggaaatcgacccgttgtatcgtcgattacgttggcagatctttattggcatcttcttcggttatgccgcttactatctggttcgtaagaactttgcgctggcgatgccttatctgattgagcagggcttctctcgtggcgacctcggtttcgcgctttccggtatctctatcgcctacggattttcgaaatttatcatgggctcggtctccgaccgctcgaatccgcgcattttcctgccggcagggttaattctggcggcgctggtgatgctggtgatgggcttcgtgccgtgggcgacttccagcatcatgatcatgttcgtattactgttcctgtgcggatggttccaggggatgggctggccgccgtgtggtcgtaccatggtgcactggtggtcgcagaaagaacgcggcgggattgtctcagtgtggaactgcgcgcataacgtcggcggcggtattccgccgctgctgttcctgttagggatggcgtggtttaacgactggcacgcggcgctgtatatgccggccttcggcgcgatcctgctggcgatttttgccttcgcgatgatgcgcgataccccgcagtcctgcggtctgccgccgatcgaagagtataaaaacgactatccggatgactatagcgaaaagcacgaagaagagctgacggcgaagcagatctttatgcagtacattctgccgaacaagctgctgtggtacatcgcgatcgctaacgtcttcgtttatctgctgcgctacggcattctggactggtcgccgacctacctgaaagaggtcaaacacttcgcgctggataaatcttcctgggcctacttcctgtatgagtacgcggggatccccggtactttgctgtgcggctggatgtcggacaaagtgtttaaaggcaaccgcggcgcgaccggcgtgttctttatgaccctggtgacgattgccactatcgtttactggctgaacccgccgggtaatccgggcgtcgatatggcctgtatgatcgtcattggcttcctgatttacggcccggtgatgctgatcggtctgcatgcgctggaactggcgccgaaaaaagccgccggcaccgccgcgggcttcaccggtctgttcggttatcttggcggttccgtagccgcgagcgccattgttggctataccgtcgatttcttcggctgggatggcggcttcatggtgatgattggcggtagcgtactggcggtactgctgttgattatcgtcatgcttggcgagcgtcgccatcatcaacaactgaaacaagcctaaggagcggcgatgaaaatgaaactcaccgcgttaatgagcggaatgattttggccagttcggcgctgtgcttcagcgccgtcgcggcagagaaaattgtcatcgcccaccgcggcgccagcgggtatctgccggaacataccctgccggcgaaagcgatggcttacgctcagggggcggattaccttgagcaagacctggtgatgaccaaagacgaccggctggtggtgttgcatgaccactatctcgatcgggtgactgacgttgcgcagcgtttcccgcagcgggcgcgtaaagacggccgtttttacgccatcgactttaccctggccgagattaagtcgctgaagttcaccgaaggttttgagccgaaagatggcaaaaacgtgcaaacctatcctgggcgtttcccgatgggcaaatccgatttccgcattcatacctttgaagaagagattgagtttgtacaggggctaaaccattcgacgggtaaaaatatcggtatctacccggaaatcaaagcgccgtggttccaccatcaggaaggcaaagatattgccgccagcacgctgaaagtgctgaaggaatatggctacaccagcaagcaggataaggtttatctgcaatgttttgacgccaacgagctcaaacgcattaaggatgagctggagccgaagatggggatggatctcaatctggtgcagctcatcgcctataccgactggaatgaaacgcagcagaaacaggccgatggtaaatgggtgaactacagctatgactggatgttcaagccgggggcgatggcgcagattgcgcagtacgccgacggtatcggcccggattaccatatgctggtagcggaaggctcgaagccgggcgcggtgaagctgacggcgatggtaaaagaggcgcacgccaaccatctgcaggtgcatccgtacaccgtgcgtgcggatcagttgccggagtacgccactaacgttaatcagctctatgacgtgctgtataaccaggcgggtgtcgacggcttgtttaccgatttcccggataaagcggtgcagttcctggacgcgaaataaagcaaaagggccgtaaggcccttttatgttttccccctctctctgtgggagagggccggggtgagggcatcaggccgcacacatcgacaacacttacatctcgatctcaatatcgcctttcgcccggcagcagcagggcaaaatctctcccggctggataaacgccagcggttcggtcagccagtcaacctggcctgacaccagacgcgtgcggcaggaaccgcaatagccttcgcggcactgatactccacgtcgatgttatgcgattcaagcgcggccaacagggaaggatgttcatcctgacactcaaggcgagtgtcagaaatcctcaagaaaatccgcttcattacagctggaagttgctcagatcgtcggcatcgacttcagaatcgatctggccgacgagataagagctgacctccacttcctgcggcgcgacctgaacgttgtcggaaaccagccaggtattgatccacgggatcgggttggagcgggtctggaacggtagatcgaggcccaccgcctgcatgcgaatattggtgatgtactcgacgtactggcagagaatatctttgttcaggccgatcatcgagccgtcgcggaacagatagtccgcccactctttttcctgctgcgccgccagcacgaacaggtcatagcactcttgtttgcactcttcggcgatttccgccatttccggatcgtcgctgccggagcgcagcaggttcagcatatgctgagtgccggtcaggtgcagcgcttcatcgcgggcgatcaggcgaataattttggcgttgccttccatcagcttgcgttcggcaaaggcgaaagagcaggcgaagctaacgtagaagcggattgcttccagcgcgttgacgctcatcaggcagagatacagtttctttttcagctcgcgcagattcacggtcacggttttgccgttgacggtgtgggtgccttcgcccagcagatgccagtagctggtcatttcaatcaaagaatcgtaatagtgagagatgccttccgcgcgtttctggatctgctcattggtcacgatatcgtcgaacaccgtcgccgggtcgttgacgatgttgcgaataatgtgggtgtaggagcgcgagtggatcgtctcggaaaaggcccaggtttctacccaggtttccagttcggggatggaaatcagcggcagcagcgcgacgttcgggctacggccctgaatggaatcaagcagcgtctgatatttcaggttgctgatgaatatatgcttttcatgttccggcagcgcctgatagtcgatgcgatcgcgcgaaacgtcgacttcttccgggcgccagaagaaggagagctgcttttcaatcagcttttcaaagatgtcatatttttgctgatcgtagcgggccacgttaaccggctggccaaaaaacatcggctcaagcagttgattgtttttcgtctgtgaaaaagtggtgtatgccatgagtgggtcctgttgagattgtatcgcccggcgacactgcgtttgccgggcctacaaaaccgtaggccgggtaggcatcgcgccacccggcaaaaatactttagatcttacatgcgccgctttcgcagccgtcgtcctgaattgacggggccaggtcatcctgggcgtcttccgcgccatcacgggtgttgtgatagtacagcgttttcacgccgaatttataggcgttgagcagatctttcagcaactgctgcatcggcacttttccggacgggaaacgcgtcgggtcatagttggtgttggcggaaatcgactgatcgataaacttctgcatgatgccgaccagctgcagatagccgtcgttattcggcatttcccacaacagttcgtaggcgttctgcagattttcgtaatccggaacgacctggcgcaaaatcccatctttcgacgctttgatgctcacgtggccgcgcggcggttcgatgccgttggtggcgttggagatctgcgaagaggtctcagacggcatcagcgcggagagcgtggagttacgcaggccgtgagtcttaatggattcgcgcagctgctcccagtcgaaatgcagagattcgctcacgatcgcatccaggtctttcttataagtatcgatcggcagaataccctgcgcgtaggtggtttcattgaaccacgggcaggcgccttgttcgatagccagttcgttggaggccttcagcagatagtactgaatagcttcgaacgttttgtgcgtcagattgttggcgctgccgtcggagtagcgcttgccatgtttcgccagatagtaagcgaagttgataacgccgatacccagcgtacgacgacccatcgcgccacgtttagccgccgggattgggtaatcctgataatccagcaacgcatccagcgcgcgcaccgccagtaccgccagatcctccagctcatcgaggctatcgatggcgccaaggttgaatgccgacagcgtgcacagcgcgatttcgccattttcgtcgttcacatcgtccagcggtttggtcggcagggcgatttccaggcacaggttagactggcgcaccggcgcgacaaccgggtcgaacgggctgtgggtgttgcagtggtcaacgttctggatatagatacggccggtagaggcgcgttcctgcatcatcagcgagaacagctcaacggctttaatacgctgtttgcggatactgtcatctttttcgtatttagtgtacagacgttcgaactcgtcctgatcggcgaagaacgcatcgtacaggccaggaacgtcggacgggctgaacagggtgatgtcctcgcctttcagcaggcgggtgtacatcagcttgttgatctgcacgccgtagtccatgtggcgaacgcggttggcgtcggtgccgcggttgtttttcaacaccagcaggctttcgacttccagatgccacatcggatagaagagggtggccgcgccaccgcgaacgccgccctgcgaacaggatttcaccgcggtctggaagtgcttatagaacgggatgcagccggtgtggaaggcttcgccgccgcggatcgggctacccagcgcacgaatgcggccggcgttgataccgataccggcgcgctgggaaacgtatttcacaatcgcgctggaggtggcgttgatcgaatccaggctatcgccgcactcgatcagcacgcaggagctgaactgacgagttggggtacgcacgccagacatgatcggcgtcggcagcgaaattttaaaggtggacaccgcgtcatagaaacgcttgatgtagtccagacgggtctcacgcggatagttagagaacaggcaagccgcaaccagaatatagaggaactgggcgctttcatagatttcgccgctgacgcggttctgcaccaggtatttaccttccaactgcttaacggccgcgtaagagaagttcatatcgcgccagtggtcgataaaaccgtccatctgctggaactcttcttccgtgtagtcttccagcagatgatgatcgtatttacctttttcgaccatgttcaccacatgggtgtacagcgccggcggttcaaactggccaaacgctttcttgcgcaggtggaaaatcgccagtcgcgcggccaggtactggtagtccggcgcatcgcgggagatcaggtccgctgcggccttaataatggtctcgtggatgtcggcggttttaatgccgtcatagaactgaatatgcgaacgcagctctacttgggaaatcgaaacgttattcagtccttctgccgcccaatctagtacgcgatggattttgtcgagattgatacgctcggtgctaccgtcgcgctttgtcaccagcagactctgattcatgtggtttttacctgtccgtgagaaaaaatatccccccatttatccacagccagtcgttgtgactaactctgtggataaatactatatgtagggggttgtcgataaaaagaacgctatatggtgagttattttagtaaggattcttttgagtacaagggttgattttgacgttaatttgaggttgcgcaggcgtaataatcgctaagtccacgccgtataaggcctggagaagaagtcaataaaacagaaaaaaaaatcaaaatttgatcgagtgctgatttcttcgtcggaagggaaaattgcgcagcttgatgccgcgcaatcatcatcataaaaacgtatgacgttatgcttttttcgccgttgtatgcaacatatagttaacatcaacgcccggcgccagcttgaaggtattggtgagcggattgtaatgcaggccggtaatgtgctgctctttcagaggagtctgatcgatccagccgatgagctccgccggcttgataaatttcttaacgtcatgcgtaccttttggcaccattttcatcacgtattccgcgccgaccacggccatcagccacgctttgccgttgcggttaatggtcgagaagaagacctggccgccgggcttcactagccgcgcgcaggcgtgcactaccgactgtgggtcagggacgtgctcgagcatctccatacaggtgacgacgtcgtactgctgggtgtgcttcgccgcatgctcttcgacggtctcttgtacgtactctacctgaacgccgctctccagcgcgtgcagttttgcgacctgcagcggctcgaagcccatatccagaccagtgaccgtcgcaccttcgcgcgccatgctttcggcgaggatgccgccgccgcagccgacatcgagcacttttttgccgaacaggccgccggagcgttcggcaatatagccaaggcgcaacgggttgatgcgatgcagcggtttgaactcgccttctagatcccaccagcgcgaggcgacggcttcaaatttggcgatttcattgtgatcaacgttgggggccaccgacggtttttcggcattcatgggcgcttttactccttttctgttctgacctgcgagtatatcagcagactgccacgaataaaccgtattgctttacctctattacgacggctgtgttataatttgcgacctttgaatccgggacacagtagagggatagcggttagatgagcgaccttgcgagagaaattacaccggtcaacattgaggaagagctgaaaagctcgtatctggattatgcgatgtcggtcattgttggccgtgcgctgccggatgtccgagatggcctgaagccggtacaccgtcgcgtactatacgccatgaacgtattgggcaatgactggaacaaagcctataaaaaatcagcccgtgtcgttggcgacgtaatcggtaaataccacccgcatggtgatatcgccgtttatgacaccatcgtacgtatggcgcagccgttctccttgcgttatatgctggtcgatggccagggtaactttggttctgtcgatggcgactccgccgcagcgatgcgttatacggaaatccgtatgtcgaagatcgctcatgagctgatggccgatctcgaaaaagagacggttgatttcgtcgacaactatgacggcacggagaaaatccctgacgtcatgccgacaaaaatccctaacctgctggtgaacggttcttccggtatcgccgtaggtatggcgaccaacattccgccgcataacctgacggaagtcatcaacggctgcctggcatacgttgacaacgaagacatcagcattgaagggctgatggaacacattccgggcccggacttcccgaccgccgctatcattaacggccgtcgcggtattgaagaggcctatcgtaccggtcgcggtaaagtttacattcgcgcgcgcgcggaagtcgaagctgacgcgaaaaccggccgtgaaaccatcatcgtgcacgaaattccgtatcaggtgaacaaagcgcgcctgattgagaaaatcgccgagctggtgaaagacaaacgcgttgaaggcatcagcgcgctgcgcgacgagtctgacaaagacggtatgcgtatcgttatcgaagtgaaacgcgacgcggtgggtgaagtggttcttaacaacctctactcccagacccaactgcaggtttccttcggtatcaacatggttgcgttgcaccacggtcagccgaagatcatgaacctgaaggacatcattgcggcgtttgttcgtcaccgccgcgaagttgtcactcgtcgtactattttcgaactgcgcaaggcgcgcgaccgtgcgcatatccttgaagcgctggcgattgcgctggctaacatcgatccgatcattgaactgattcgccgcgcgccgacgccggcggaagcaaaagcgggtttaatcgcgcgttcatgggatctgggcaatgtctccgcgatgctggagcgcgccggcgataacgccgcacgtccggaatggctggagccagagtttggcgtgcgtgatggccagtactatctgaccgaacagcaggctcaggcgattctggatctgcgtctgcagaaactgaccggtctggagcatgaaaaactgctcgacgagtacaaagagctgctggatcagatcgccgagctgctgcacatcctgggcagcgccgatcgtctgatggaagttattcgcgaagagctggagctggttaaagaacagtttggcgatgcgcgtcgtaccgaaatcaccgccaacagcgctgatatcaatatcgaagacctgattaaccaggaagatgttgtcgtgaccctgtcgcaccagggctatgtgaaatatcaaccgttaaccgactacgaagcgcagcgtcgtggcggtaaaggtaaatcggcagcgcgtattaaagaagaagactttattgaccgtctgctggtggccaacacccatgacacgatcctctgcttctccagccgtggtcgtctgtactggatgaaagtgtatcagttgccggaagccagccgcggcgcgcgtggtcgaccaatcgtcaacctgctgccgctggaagctgacgagcgtatcaccgctatcctgccagttcgcgagtacgaagagggcgttaacgtctttatggcgaccgccagcggtaccgtgaagaaaacggcattgaccgagttcagccgcccgcgttctgccggtatcattgccgtcaatctgaacgaaggcgacgaactgatcggcgtcgatctgacttctggccaggacgaagtgatgctgttctccgccgctggtaaagtggtgcgctttaaagaagacgccgttcgcgcgatggggcgtaccgcaaccggcgtacgcggtatcaagctggcgggcgaagatagcgtcgtgtcgctgattattcctcgtggcgaaggggcgatcctgaccgtgacgcaaaacggttacggcaagcgtaccgcggccgaagagtatccgaccaagtcgcgtgcgacacagggcgttatctctattaaggtcaccgaacgtaacggttccgtggtcggcgccgtgcaggtcgatgattgcgaccagatcatgatgattaccgatgcgggcaccctggtgcgtactcgcgtttctgaagtgagcatcgtgggtcgtaatactcagggcgtgattctgatccgtaccgcggaagatgaaaacgttgtcggcctgcagcgcgtggctgagccggttgacgacgaagaactggatgccatcgatggcagcgtagcggaaggcgatgatgatatcgcgccggaaaacgacgctgacgacgacatcgccgaagacgaagagtaatcgtcgcaggtaaatgttctgaaagggccgggtgttatcccggccctttttgcattaacattgcggcaaagcccatttaccgctactttaaccccattctgttgagcccctgacgaccgagcattgccccattgaaatatcttgcctcgtttcatacgaccttaaaggtttctcgttatctgttcagagcgctggcggttctgctatggatgctgattgcttttgtctccgtgttttatatcgttaatgcgctgcatgaacgggaatcggaaattcgtcaggaactgaatcttaacgccgaccaggcccagcgctacatccagcgtaccgcggatgtcatcaaagagctgaagtacgtcgcaggcaatcgcgcggcgaccgggagcgagggtagtgcggcgttggccaacagcggcaatatcgctatcccaaattttgaaccgctgtatccggattccgactgcggcgcaatgagcggcgcctggcgcaactcactgcaatcgctggcgtggttcatgcgctactggcgcgataacttctctgccgcctacgacctgaaccgtatttttttaattggcagcgacaacctctgcatggctaacttcggcctgcgcgatatgccgctggagcgcgatcaggcgctgaaggtgctgcatcagcgtatcgaacaatatcgcgatgcgccgcaaaacgagcgcggcaataacctgttctggattagccagggcgtgcgtccgggcgttggttatttctatgccctgacgcctatttatatggctaaccgcctgcaggcgatgctcggcgttgagcagactatccgcatggagagcttctttacgccaggtagcctgccgatgagcgtgacgatcctcgatgataacggtcagcagctcatttcccttgccgggccggataacagcattaaaccggaaacccgctggatgcaggagcggatgtggtttggttacagctctggtttccgcgagctggtgctgaaaaagagcctgctgccatcatcgctgagcattgtctattctgtttccgtcgatcaggtgctggagcgtatcaggatgctgatcctcaacgctatcgtgctgaatatcctgaccggcgctatcctgttcgcgctggcgcgtatgtatgaacggcggatatttattccggcggaaaacgacgctcagcggctggaggaacatgagcagttcaaccgtaagatcgtcgcctccgcgccggtcggaatctgcattctacgcacgcaggacggcaccaatatactgagtaacgaactggcgcataactatctgaatatgctgactcacgaagatcgccagcggctcacgcagattatttgcggccagcaggtcaacttcgtcgacgtgttaaccagcaacaacaccaacctgcagattagttttgtacactcgcgatatcgtaatgaaaacgtcgccatttgcgtgctggttgacgtttccgcccgtgtgaaaatggaagagtcgctgcaggagatggcccaggcggcggagcaggccagtcagtcgaaatcgatgttccttgccaccgtcagccacgagctgcgtacgccgctgtacggcattattggcaacctcgacctgctgcagaccaaagcgttgccgaagggagtcgatcggctggtgacggcgatgaataactcctccagcctgcttttgaagattatcagcgatattctcgacttctcgaaaattgagtctgagcagctcaaaatcgagccacgagagttttcgccgcgcgaggtcatgaatcatatttcggcgaactatctaccgctggtggtgcgcaagcagcttgggctgtactgcttcattgagccggatgtcccgcagacgatgattggcgacccgatgcgcctgcagcaggtcatttccaacctgctgagtaacgccattaaatttaccgataccggctgtatcgtgctgcatgtacggcgcgccggcgactatctgcaaattagcgtacgtgataccggcgaagggatcccggcgaaagaggttgtgcgcctgttcgacccgttcttccaggttggtaccggggtgcagcgtaatttccagggaaccggcctgggactggctatctgtgaaaaactcatcagcatgatggatggcgacattgacgtggaaactgaacccggcatggggagccgtttcaccattcgcattccgttatacggcatgcagcagatgccgccgctgttggccgaacagcacagcaacagcacctgttggctggcgattcataatacgtcactggcgctgtttatcgaatcgttgctgcaatatcatggcctgacggtacggcaatttgctggccagacgccagccgctgacgatattttattaaccgatgatgaactcagcgggcgttggccgggaagcgctgcggtgatcttctgccgtcggcatatcggtatccccgttgagcgcgcgccgggagagtggttgcatagcgtcaccacgccgcatgaacttctgccgttgctgggacgcctgctgcatctggcgctggcggtagaagagaatggtccggcgctgtcggcccacgacgcgccaacggtcagcaatgacgacatgatgattctggtggtcgacgatcatccgattaaccgccgcctgttggccgatcagcttggctcactgggttatcaatgcatgacggctaatgatggcgtcgatgcgcttaacgtcctgagtaaacaacatattgatattgttctcagcgacgtgaacatgccaaacatggatggttaccgtctgacgcagcggatccgtcaactggagatgacgctaccggttattggcgtcacggctaacgcgctggcggaagaaaaacaacgctgtctggagtcgggaatggatagctgtctgtcaaaaccagtaacgctggatatcctcaagcacacgctggccacctatgccgcgcaggtacgtaaagccagaaaaacaagctgaggccgcacggaatggtgctgagagctccccggcgcgcgatgctctccggggcgggaataaagtttcagaatggcccggaaacggcggctggccgccatccgggaaaagtgaattactctttatccgttgaggtaagagaaacggaagagaggtagttcagcagtgcgatatcattttcgacacccagcttcatcatggccgatttcttctggctactgatggttttaatgctgcggttcagctttttggcgatctcggtgaccaggaagccttcagcgaacaaacgcagaacctcactctctttcggcgacaggcgtttgtcgccataaccgccggcgctgattttttccagcaggcgggagacgctttccggagtaaactttttgcctttctgcagcgcggccagcgctttcggcagatcggtcggcgcgccctgtttcagcacgatcccctcaatgtcgagatccagtactgcgctcaggatcgccggattgttgttcatcgtcaggacaatgatcgacagctccggaaaatggcgtttgatgtatttgatcagggtgatcccatcgccatatttgtcgccaggcatcgacaagtcggtaatcaggacgtgcgcgtcaagtttaggaagattgttaatcagagctgtggaatcttcaaattcgccaacaacattcacccactcgatctgctcaagtgatttgcgaatgccgaacagtacgatcggatggtcatcggcaataattacgttcatattgttcatgtattaggctaccttgctacagcaagctcttgacgtaaccgtcaatgtcgctgatgtatttttctataccttgagtatctcgttcatgaatcagatgctcaagcgcttcacataactgcttgccgggtatcaaattaagcatagcaaacgcgcctttaaggcggtgagcggtctgcgccagcgcagcgaaatcgctggtggtgaattcagtatacaatctctgaacatcatccggtaccgtgtcggcaaacagcgcgtaatagccgctggcatggagttccgcattcccctcgtttcctgttgaggagggctgaacctcttcttgcgccagctgctgctcaatcagctgcaggatagcttcctgcatggcagtgctgatattaaaattgacgctcaactgacctgggccaattttgcgtatcccaacctcatcatcgcttaaaagcaagcctgaagcagtaagattagacggattatccgttaaaaagagatcatactcttgacttgtgagcctttcgtccggggtgatgcagcttgcgccccagctctctaactgacgcgtcacaatgcggcgcacttcattggcggtgatgtcaatcatcacgaccacatcgtccagcagatgttcgccggagtcgctctcttcctcactcgccgccattttaaggtgtagcgagtagcgggtgccgagcgactcccgcgccttaatattaagctgtccgccaagcttgcgagttaaccggtcgcacagccagaaggtgagggcgttggctttgccgtactggtcggcttgcgtctcattaaggaacgggaagtgcatattatcgatttcattgccgctcacgccattgccagtatcgaggatacggaaggtcagacgatcgtcggcagattcatctttgctcacctcaagagtaattttaccgatgggggtggtggtgatcgcgtattgaatcagaagtaatagcgttcggcgcagcgcgtcgcagtcgccgtagcgctgctcattggccggcagcgcattattgattaacagctgaagtcctttgcgtttcaccatcggcaggacttcaggaaccacttcatctattaagccctgaatggagaacaaaccgggggtggttttccaggtatcgctttccagtaagttcgccaactgaatctcatcgacaagatgaaccagttcatcagcgtgctgcgctagtttgcggctttcatgaatcccgacggccgccgcctcctgcgccagcgcctgcgccggttctttcagcgcggcgccaatattctgcataaaggcgatgcgcccctgctgatttttctcatacagacgctgggcctgtttgagttttttgttcaccatcacttctctatcctggtcgcgaataatcaggatctgcgtgcgaggagccacctggctgcggtactggcggatttcataaagttcattattgatcgtcgcctgaatcaccccttgatgctgatcggccatattggtgatgttctgcaggttgaggtgcggcagcagatgatcggcaatcgggttactaataatggtgcgattggcttcctgatcgtgcaccaacaggcccaacggtagcaaagagacgatctcttcattaattgcgcgctgagcgcgcagctcgctgttggccgcggtgggggccgtgcttacgctgccgggggtacggcggccgctatagttgcggaaagtggtaaagccaaacagggttaacgccagcaggccaatggtgagcagcagcggcagtaaaatattctgtaaggattccattagcaaagtgctgaacggcacgacccacaccagccgcatgccggtggtattgatggcagtggttatctcaatacgcaggccattaaagctgacgctaacgttatcaacggcttctttgtctgcgctgctagcgccattttgcgccggatctggctcgagacggaagctgtccagcgacatgctcggggggatgaggtcgttaatcggtaaatcgaaggcgacaaccgttgccaggtgacccggctggttaaaagtggtacgcagcgtgaagtaatggccattttgcccgtcaggtgacgcagtgaagaaaaggtttcccgttcgtccagcgtgtttgcctgcaggagcatttcggcgcggcgggattccaccacactgctaatcgtcgattctttaaaactcgaagacagatctttcagcggcagggtggagaccagaatcaggctgttatccaacccattcaggtaatacatcgaccagggaatggtttccgcgccccataaaatatcgaggtagttggaaattttctgcgtcatctcaagcgtcgagctgtcatgagagccgaagatcagcgcttcggtcttacgtcgcggcttttccagatagtagacatcctgcttcagccgcgtctcctgcagaccatcgcttgaggtacttgagctggtggcggcaatgttgtcgtaaatctgccaggtggcataacgccaggtatcaatgcgtttgtgtaaagcgtggctgatatcaaccacctggtaactccggtcttttagccacgtattaaccgaactttggatcatcacgcccatcgtcgcgagcaagacgataaccatcaagatgaagaaccgggtgatgctaccggggatcagggagaattttttttgggtcatcgcgtggcagagctgctcagtagtgtttgtaaacaggatgttgcgccatagtgacgggcagcacaacgaatactggcaggaagtataaaggctaacgcgggaaatccatacaacagattgacgctgagggatcttttaatgctgagatttctctcaaaaccatagatgcgacaaatatgtacagttgaattgatcttgtacaattaaccgacatttcttgcagataaatagcactaaaaaacaagaaattggccaaataggctgactttcattcggaattgattgattaatagtcgttatttttttgctgcgttagcacagcataattcaagatacgtaaagaagggtaaaaaaaaccggatgcgaggcatccggttgaaataggggtaaacagacattcagaactgaatgacggtaataaataaagttaatgatgatagcgaggattattttagtcttcggggaggattttgttttaccattcagtgctatacatttgaatgcttataatgcaatgatttttaatgaaaatattatttttttgatttttggtgcttatttttgcgacctttattgcgcctaaaaagttccttggcatttacaaattgaaacatcttgtgcgcattttgaaacaccttagaagttttcgtatcatattcttgttggattattctgcattttgcagcacaatgaatacagccgactgattagaagggtaatcagtaagcagtggcaataataaaaggcatataacaaacagagggttaataacatgaaagttaaagtactgtccctcctggtaccagcactgctggtagcgggcgcagcaaatgcggctgaaatttataacaaagacggcaacaaattagacctgtacggtaaaatcgacggtctgcactacttctcttccgacgacagcgtcgacggcgaccagacctacatgcgtatcggcgtgaaaggcgaaacccagatcaacgaccagctgaccggttacggccagtgggaatacaacgttcaggcgaacaacactgaaagctccagcgaccaggcgtggactcgtctggccttcgcgggtctgaaattcggcgacgcgggttctttcgactacggtcgtaactacggcgttgtttacgacgtaacttcctggaccgacgttctgccggaattcggtggcgacacctacggttccgacaacttcctgcagtcccgtgctaacggcgttgccacctaccgtaactctgacttcttcggtctggttgacggcctgaactttgctctgcagtaccagggtaaaaacggcagcgtgagcggcgaagatcagaccaacaacggtcgcggcttccagaaacagaacggcgaaggcttcggcacctccgtgacttatgagatctgggacggcatcagcgctggtttcgcgtactccagctctaaacgtaccgatgagcagaacaactctacttatttttctaagtcctatcagcgtacatacggtgttctgggtgaaggcgatcacgctgaaacctataccggtggtctgaaatatgacgccaacaacatttacctggcgactcagtacacccagacctacaacgcaactcgcactggcgacatcggttttgctaacaaagcgcagaacttcgaagtggttgctcagtaccagttcgacttcggtctgcgtccgtccgtggcttacctgcagtctaaaggtaaagacatgggccgttacggcgaccaggacatcctgaaatatgttgacctgggtgcgacctactacttcaacaaaaacatgtccacctacgttgattacaaaatcaacctgctggacgacaacaagttcactaaagatgcaagcatctctactgacaacgttgtggctctgggcctggtttaccagttctaagcaagctgaagtgttgaaaaaggcgcctgcgggcgcctttttttatgcccggtttaacctcgctggtatactctggctgcctttgtaacaggagcccgttttcatggataccacctttttccgcgccgcctttttcggcctctgcgttctgcttaccggctgtgattccgcgacatccccggccacgccaaaatccgccgccaccgtgctcgatggcaaaacgatggggacctactggcgcgttagcgttgttgggttggatccggcgaaagccgaagatttacgccataaagttcaggcgcagctcgacggcgatgattggctgctttcgacctggaaaaacgactccgcgctgatgcgcttcaatcatgccgccaccaccgaaccgtggccggtgaacgaggcgatggcggatatcgtcactctgtcgctgcgcattggcgccaaaaccgccggagcgatggacattaccgtcgggccactggtcaatttatggggttttggcccggataagcagccggtaaaaacgccgacggagcagcaaatcgcggcggcaaaagcgcataccgggctgcagcatctgacggtgattaaccgcgccgataaacaatatctacaaaaagatattacggatttatttgtcgatctttccaccgtcggcgagggctatgccgccgatcatctggcgcgcctgatggagcaggaagggctcgcccgctatctggtgtcggttggcggcgcgctggtcagccgcgggatgaacggcgacgataaaccgtggcgggtagcgattcaaaaaccgaccgaccgtgaaaacgccgtgcaggcgatagtcgatatcaacggccacggcatcagcacctccggcagctatcgcaactactacgagctggacggcaaacgtatttctcacgttatcgatccgcaaaccggccaccccatcaaccataagctggtatcggtgacggtgattgcgccgacggcgctggaagctgacggctgggataccgggctgatggtattagggccggaaaaagcgcaacaggtggcacacgagcaggggctggcggtctatatgatcgtcaaagagggcgatggctttaagacctggatgtcgccgcagttccgcaccttccttgtcggcgagcagaattaaaaagcaagaagcgcagttttttagatcggagcaaggcgcaaagtaaggatacacttacagcaggagcccgctatgaaaccgatgattgccgatatgactaacgatgaccgccgctggcaggcggtctgcgaacgcgacgccagcgccgacgggcagtttgttttcgccgtgttgaccaccggcgtctgctgccgtccctcgtgccgttcacggcgcgcgctacgggagaatgtccgcttttatgctgatgtcgaagccgcaaaggccgccggatatcgcccctgtaaacggtgtcggccggataatctcgacccggaccaacagcgggtcgagaaggtggccgccgcctgccgtctgctggagcaagaggtgccaatcacccttgaggcgctggcgcagcagctggcggtcagcccgtttcacttccatcgtatttttaaatccgtcaccgggctcacgcccaaggcctggcagcaggcctggcgcgcgcggcgcctacgcgaagcattaagccacggcgagaacgtcaccagcgcggcattagccgccggcttccctgattccgccagctattatcgccaggcaaatgagacgctgggcatgaccgcccgccagtttaaacgcggcggcgcagatatattgattagctgggtttgctgcaatagcgcctcaggacggtgcctggtggcgttcagtgaacgcggcgtatgcgctgtgttgctgggcgatgacgataaggcgttatatgcgcagctggcgagcttgtttcccggcgcccaattacagccgggtgatgacacgtttaccgaacgcgtggcgcaggtggttgcccatctggacaacccgcagcaggcggtgaatttgccgctggatattcgtggtaccgctttccagcaacgggtctggcaagccttgcgccagatcccggcaggcgaaacccgcagctatcgcgaggtagcgcatagcatcggtcaaccgcgcgcggtcagagcggtagccggggcctgcgctgccaataaactggcgatagtcattccttgccatcgggtagtgcgtgagggcggggcgctttccggctatcgttggggaagcgaacgtaaagcgctgctgctggcgcgcgaagcaaaaatgcgggagaaataatgctcgatctgtttgccgatacgccgccctggcaggagccgctggcccccggggcgatgatattacgccgcttcgccgtgcagcgcgcgccggcgctgctgcaggccatcgccgcggtagccagcgcttctccgttccgccagatggtgacccctggcggttataccatgtcggtggccatgaccaactgtggccaactcggctggacaaccgatatgcacggctatctgtatgcgccgggcgatccgttgaccggcgaacattggccgccgatgccattgatttttcagcaactggcggcggaggcggcgcaggaggcgggttatgcgcatttctccccggacgcctgtttgattaaccgctaccagccgggcgcgaagctgtcgctgcatcaggataaagacgagcgagatttgcgcgcgcctatcgtttcggtgtcgttggggctgccggcggtgtttcagtttggcgggctgaaacgtaacgatccgctgcgtcggctgctgctggagcatggcgatgtggtggtgtggggcggcgaatcacggctcttttatcacggcatccagccgcttaaaccgggggagcacccgctgaccggcgcctgtcgttataacctcacgtttcgcctcgcgggaggccggcaaaaacaaaaataagaattattcttgctgtcgtcggcaagccgtttaaactgctggctgtttgcttgtccggatcgtagcttatggaattacttgttcttgtttggcgccagtaccgctggccgttcattgccgttatggcgctgagtttgctcagcgcggcgctgggtatcgggcttatcgcctttattaacctgcgcctgatttcccttgtggatacctcgctcaccgtgctgccggagtttctcggcctgctgctgctgttgatggcggtcacgctcggctcgcagttggcgttaaccacccttggtcaccactttgtctatcgcctgcgcggcgaatttattaaacgcattctcgacacccaaatcgaaaagatcgaaaaaatcggcagcgcttcgctgctggcgggcttaaccagcgacgtgcgtaacattaccatcgcctttgtgcgcctgccggagctggtgcagggcattattctgaccttcgggtccgccgcctacctggcgtttctgtcaggtaaaatgatgctggtgaccgcggtctggatggcggtcaccatctggggcggctttgtgctggtggcgcgcgtttataagcatatggcgatgctgcgcgagaccgaagataagctgtatcatgattatcagacggtgctggaagggcgcaaagagctgacgctgaaccgcgaacgcgccgaatatgtttttaatcagctgtatctgccggatgcccgcgactatcgccaccacatcattcgcgccgatacgttccacctgagcgcggtgaactggtcgaatatcatgatgcttggcgccatcggtctggtgttctggatggctaatggcctcgggtgggccaataccgcggtggcggcgacctattccctgacgctgctattcctgcgcacgccgctgctgtcggcggtgggggcgctgccgaccttgctcagcgcccaggtggcattcaataaactgcatcagttcgcgctggcgccttatcgcgccggtttccccgagccgcaggcgcatccgcactggcagaccctggagctgcgcgacgtgtcgttccactacccggataacagttttgccgtcgggccgattaatttgactctcaaacgcggcgaactggtgtttctgattggcggcaatggcagcggcaagtcgacgctggcgatgttgctgaccgggctgtatcaaccgctctccgggcagatcctgctcgatggtcagccgctggcggcggaaaaaccagaagattaccgcaagctgttctcggcggtgtttaccgatgtctggctattcgaccgtctgttagggccaaaaggcgaacgtgccgatccggcgctggtcgcgaagtggctggcgtatctgaagatggaccacaagctgcagctggaagaggggaaaatcctcgatctgaagctgtctaaagggcagaaaaaacgcgtggcgctgctgctggcgctggccgaagagcgcgatatcattttgctcgatgagtgggctgcggatcaggatccgcatttccgccgcgagttttatcaggtgttattaccgttgatgcagcaaatggggaaaaccgtgtttgctatcagccacgatgatcactatttccagcatgccgatcgcctgctggagatgcgcagcggcaagcttagcgagctcaccggcgttgagcgcgaactggcgacccgcgacgcggtcgcgcgtactgcctgacggttttgctggtaacccgagcgggcgtgctcgcccgttcgggccatattgctgttttttacggcagataaattgctggcggttattatttccccctcctcgcgctatgcttatggctgcggccatgcaggtcgacttctattctcacaaggattgcctgagcgatgtccgttttgcataaaaaaagcgcccgattacgcgatgaagaacgcgcccgcctgatttggctattgagcactgataaagccgtcacctccgcgctgctggggaaactcaccctcgcggagcgctatgatgaagggacgctggccgatgacctggcggaagtggaagtgctggtgtcgcatctgccgccgccggacctcgccgatgccctggaagcgctaccctatgacgcgcgtaccgcgctgtgggggctggttgccgatgacaagcgcggcgaagtgctgctggaggcatcagagagcgtatggggcgatctcatcgataagatgagcgatcacgacctgatatttgccctgcaatcgctggatattgatgaacaggtttacctgttgcagcacctgccgcgcgacttaaccggccgcctgctggcgacgctgccgccggataaacgcgcgcgcattcgtcagatgatgcgctacgccgataacaccgttggcgcgatcatggaatttgaagtgattaccgtacgcccggaagccactctggcggcggtacagcgctatctgcgccgtctgggcaaaatgccggaaaacaccgacaaactgttcgtcaccacccgtaataaactgctgcttggcgagctggagctgcagactattctgctcaatgatgcgcaaaagcgcgttggcgaagtgatggaaggcgatccggtgactttccagccgcaggaagaggcggaaaaagtggcgcgtaccttcgagcgtgatgacttactgagtgctgcggtgattgatgtcgacggcaagctgatggggcgtttgaccatcgatgagatcgtcgatgtggtgtacgaagagaccgataacgacctgcgccggatgggcggtctgagcgaagatgatgatgtttttgcgccggtgagcaaagcggtgaaaacccgctgggcgtggctggcggtgaacctctgtacggcgtttatcgcttcacgggtgatcgatggctttgaacataccatttctcaactggtggccctggcctcgctgatgccgatcgtcgccgggataggcggaaataccggcaatcagacgatcaccatgatcgtccgcgcgatggcgctgcaaaagatccagccgggaagttttaccttcctgatcctgcgcgagatgggggtggcgctgattaatggcctcgtatggggcgggattatgggggctatcacctggtggttatacgatgacccgcagcttggcggggtgatgacgttggcgatgatgctcaatctgctgatggcggcgatgatgggggttatcatcccgatggtgatggtcaagctggggcgcgatccggcggtcggctccagcgtgatgatcaccgcgattaccgacaccggcgggttctttattttccttggtctggcgacgctgtttctgatgtaagctgcgcttttacgcgcaggcggcgagggatgagcgccattgcgataagccccgccagtacgccgatcgccagattactggtcgtgaccgtcacgacgacggttgccgccatgaccagcgtttccggccacggattgcgcgccagcgcggttgggcgaatactctgccagctgaaggttttcaccgccacaatcaccatgaccccggccagcaccgccattggaattttggccatcacctggctaagcgccgtcaccagaagcagcagtaccagaccggccactatcgtcgataggcggctacgcgccttgcccatttccacgttaacgatagtctggccgatcatcgcgcacccggcgatgccgccatagcagcccgcgaggatattggcgacccccagtcctgcgctctcacgcgacttatttgacggcgtatgggtgagatcgtcaaccagctttgccgtcaacagcgattccatcaggccgacaaaggcgatactcagggcgcagggccagataattttcaaggtgcttaaatccagcggcaccgccagcgcgttgaagcccggcagaccgccgcccatggcgccttcatcacccacggtcggcagcaactgtccgctggtgacggtataaacggtgagaaggacgatagcaataagcggcgccggcacggctttgataaaacgcggcgcccacagcacgatgagcagcgtcagaacgaacaggccgacgatgagcggctgcctgctccagaaatggggaacctgggcgaaaaaaataagaatgcctagcgcattaacaaacccggtcatcaccggtggcgggataaagcgcattaaccgcgccataccgcatatcccaaacaaaatttgaataataccagccagaatgacagcaggcagaatataccctacgccatgctgatgtaccatcgggccgatcaccagggcgacagaacctgccgccgccgtcaccatcgccgggcgcccgccaagaaccgacatcgccagacagagcactaccgaagcaatcaggctgacctgtgggtcaacgccggcaatgaccgaaaatgaaatgacttcagggattaacgccagggcagtcagcacgccagcaagggtctcgcgtgttatcaacgccggagagagagagcggaaagttgagggcataaaagttcgcggatgataaaaaatttgaagtgaggcatgccgccgttggcgtgcgctccatcacagaacgggagatgatagcgcggaaatgaccatcataccagtacaaaaagtgattttgtgtacacatttattaaacatttttataacagatctcaaaactcaacttaaaatttaaacaatatttaaatttttgagtacaggtggtacctttgatcccgagaatcgtttcacctgcgctaaataaaaaagcgagtaaaagtaaggctcaaatccgatgaagaaaaagatggccgtacccagctcacaggcggttggttccaatacaaatcggaccaacacccgccatgagcaagagacggatgtattgttgattggcggcggtatcatgagcgccacgttgggaacctggctgcaggaactggagccggattggtctattaccatggtcgagcagatgaccagcgttgccgaggagagctcgaacggctggaacaatgcgggtaccggccatgcggcgctgatggagcttaactacacgccgcaaaccgccaatggaatcaatatcgacaaagcggtcgatatcaatgagtccttccatatttctcgtcagttttgggcccaccaggtgacccgcggcatcctgactaagccgaaatcttttattaatagcgtgccgcacatgagctttgtgtggggtgaagacaacgttaacttcctgcgcgcgcgctacgcggcgctgcagcagagcgagctgttccgcggtattcgctattctgaagatcatcagcagatcaaggagtgggcgccgctggtgatggaaggtcgcgatccgcagcaaaaagtggcggcgacgcgtaccgaaatgggcaccgacgttaactacggcgagatcactcgccagctgatcgccgggctacagacgcatgataacttctctctccagttgggtaccgtcgttcgccgctttaagcgcaatgcggacaacagctggacggtgacgctggcggatgccaacaatcgtcaccagaagcgaacgatcaaaaccaaattcatctttattggcgcgggtggcgctgctctgacgctgctgcaggaaaccggcattccgcaggcgaaagagtacgcgggcttcccggttggcggacagttcctggtgtgtgagaacccggaagtggttaatcatcacctggcgaaagtctacggccaggcggaagttggcgcgccgccgatgtcggtgccgcatatcgatacccgtattatcgacggcaaacgcgtggtgctgttcgggccattcgcgaccttctcgacccgtttcctgaaaaacggatcgctttgggatctgctggcctcgacgaatacctcgaatattttgccgatgcttaacgtcggaatggataacttcgacctggtgaaatatctgattagccaggtattgcagaaagataaagatcgtcatgccgcactgtgcgagtactacccggaagcgcgcaaagaggactggcgcctgtggcaggccggtcagcgtgtacagattatcaaacgtgataagaagatgggcggcgtgttgcgccttggcaccgaagtggtgtgcgatgatgaaggcagcgtagctgctctgctgggcgcttctcctggcgcgtcgacggcggcgccgatcatggtgcagctgttggagaaagtcttcaaagacaaagtacagacgccggcctggcaggcgaagatgaaagagatcgtgccgagctacggtatgcgtctggatggtaacccagccgctattgagcaggcgctggcgtggaccagtgaagtgctggggctacactacgagccgacgaccgcggcggacgaggtgccgcaggccgaactcaaaccgttgaccggcggcaaaccgatggcggatatcgcgctataacaaaaacggcagccttcgggctgccgttttgtattaccgcaggcgattaacgctcaacggcattaccgatagtttcttcagctttccagatgcggtatttcacttcgacgttggccggagtataaaccacgatcggcagcttgctgttgtaacgcagcaggcctgtatcgccgagaccagcggtaacaaatttcttctctttcttaccgtccgggcaggccatcattgatgcgccgcgcgataaatgcactctatcttgtgcgataaatggcatccacgcggcgtttcattatttgaaaaagaattacatttcaggttgcgttatgacagtcccaacagggtgatagcggtagatcgttgacagtccaatatcatagataattgccagccgcttcctgtcataccctttctggagcaatcttgcgatctgctcatgctgctccttcgtcagtttcgggcgacgtcctccaactcttccttgtgctcgcgcagcagccagtcctgccagcgtgcgctcaactatcagttcacgctccatttctgccagtgcacccatcatatgaaaaaagaaccttcccatcggagtgctggtatcgattgaatccgtcagactgcgaaaattgacaccttttgcgcgtagctcttctgtgagagcaatgaggtgtttcattcttctacccaaccgatccagcttccagaccaccaatgtatcccctcttttaaggcactttaaagcgcgtttcaggcctggtcgttccgacttggttccgctcattttgtcctcaaaaatctgttcacatcctgcgcacattaatgcattgcgttgcaaatctgtgttttggtcatttgttgacacacgtatgtagccaatcagcattaaaaatactcccttttgagtggttaaagtactgagataatgtggggaggatttgagagataaacgttggtttgggggaaggctctgcactgcctgttggtgtgcctgttccatggcccaccgccacgccgccagcaggctggttgaagtgcgacggacgctcctttacaaaagaacaatatcctgttctggccagagcctacccgaccctccgcctgcctgatttacgcggtgaatttattcgtggttgggatgatgggcgaggggttgatacgaggcgttcattgctaagtggtcaggctgcaacatttattcgtacagctttgcaggattattacggttacgatctgaatactaatgtcaaagtaggtatcgcttttgctactgctgattctgttataaccgttggaaacccagctaatcctaaagcaggaaataatagcgattatgttcctgcatcagcagataactctataacaggtattcaaatgacggcggaagatagttttaccggggcatggatatcaatgcgcccccgcaatgttgcgtttaattacatcgtaagggccgcataaaaacgttggtttgggggaaggctcggcgctgcccgttggtgtacctgttccgtggcccactgccacaccgccagcaggctggttaaagtgcgacgggcgcacctttacaaaagaacaatatcctgttctggccagagtctacccgaccctccgtcttcccgatttacgcggtgagtttatccgtggatgggacgacgggcgcaagattgacgaggggcgtaagttgctttcatggcagaaaggtacactggtcggcggtcatgacgataacgattcttcgcttgatatctcgtacatgagtaacggaaataatattgactatggcggcgataaggtgtttgcggggaattaccgtagcgattatttgtggtacgcagtgctgggtggaacaaacagtcgcgcaaaagccgaattaaacggagcattctttaacataacccgcccccgcaatatcgcgtttaactatatcgtgagggcggcgtgataccgttcaactggcaagtgccagtggcgcttccggccagctgatttcaggtgccgtgctgatatccagtgcgttcagctcgtcgatataatccagcacggcgttcagttttgccgtttcttctggtgtcagactgcgaccagcacgcagtttgaggttgataagatcgacggacgccatcgcctgtttcacccgttgctggcgttgctgtctggcaacctccagttctgcggctcgctgccgttcagtatcggttacccacgcctcaccgttccaggtatcccatggcgtggctggctgttttgtggtggtgtccgccgggtaatcacccggttgggtaatcagaacggggttaccgttctccgtgctgtataccgtctcgccgcggtgatcaggcacatgctcccacccgttcagcgtggcagtccggcaaaccacgtaacccgaaattgcctccggcggtgcatcggcgcacgaatgtgccggagtacccaccccaagggcgagatactccacagaggatgaggtgtattcccgggtttcctcgtcatagtgatatacagtgatatcgcccgctacagtggcgataccgttttcatccagaactgcagtgttactcattaaactgccctcacaatgtaattaagtgcaatgctacggggtctgacagtgatacccttcgcatacccgcttctgatagaggtcagaatagtagcctgcataccattgtctgacattgccatgacaggatcgctgaatgttgtcccgtccggcattttaaagctgccctcacgaaggtctgtaatggaatcttcattgttgaatcccatgccgactatccccgaggttcccgtagtgtcctggttataataatccagcattgctgttcttaacagcgttgccccttgtgcggacagcaacttacgtcctgtatcaactttgcgcccgtcgtcccatccacggataaactcaccgcgtaaatcgggaagacggagggtcgggtaggctctggccagaacaggatattgttcttttgtaaaggcgcgcccgtcgcactttaaccagcctgctggcggtgtggcggtgggccacggaacaggcacaccaacgggtagcgccgagccttctcctaaaccaacgtttttatgcggcccttacgatgtaattaaacgcaacattgcgggggcgcattgatatccatgccccggtaaaactatcttccgccgtcatttgaatacctgttatagagttatctgctgatgcaggaacataatcgctattatttcctgctttaggattagctgggtttccaacggttataacagaatcagcagtagcaaaagcgatacctactttgacattagtattcagatcgtaaccgtaataatcctgcaaagctgtacgaataaatgttgcagcctgaccagttagcaatgaacgcctcgtatcaacccctcgcccatcatcccatccacgaataaattcaccgcgtaaatcaggcaggcggagggtcgggtaggctctggccagaacaggatattgttcttttgtaaaggagcgtccgtcgcacttcaaccagcctgctggcggtgtggcggtgggccacggaacaggcacaccaacaggcagtgcagagccttcccccaaaccaaggtaattgaggacatcttttatactgcccttagcgataatagcgcgaccaatagctgtaagggttgccagcgctgcgcggtctgctccggtaaaataaggcaaccgatctgctgcagtggcaagtcctgccagagcagtgagcgtggcatctgccggttgttttccgtttgccagatcgtatgcagccttgaccgctttcggtgtggcggccagtatttcagacgtgctgttgatggcactgctcaattgtacggtgccttttgccgtcagcgaggcagcaggcactcccgttatctgactccacgggtgagtgtggctgacgggcgccttgccggctgcaaggtcgtatgcagccttgaccgccttcggcgtggcagcctcagtttctgattgactgtccgtggcgctgctcagttgtacggtgccttttgccgtcagcgaggcagcaggcactcccgttatctgactccacgggtgagtatggctgacgggggccttgccggcagccaggtcatatgcagccttgacggcctttggtgtggcggccagcgtttcagaggtgctgttggtggcactgctcagttgtacgatccctttacgggtcgttgttgcatcctgggctgtgtattttccccgggccagatcatacgcgattttcacagccttcggcgtggcagcctcagtttctgattgactgtccgtggcactgctcagttgtacggtgccttttgccgtcagcaaggcagcaggcactcccgttatctgactccacgggtgagtgtggctgacgggtgccttgccggctgcaaggtcgtatgcagccttgacggcttttggtgtggcggccagcgtttcagaggtgctgttggtggcactgctcagttgggtgaaccccttagctgtcagtgtcgcgtccgggtggttacgggaacgtacgtgttcagccagtgactgtgcggcttcctccgtttttttcttcagccatttcgtcctgtttgccagttgccggggggctcgatttgatatcccgtcagcaccacccagaaccggatctgatgtctccagttgatagatattttcttcccacttttctgtttcattcaggtttcccataatcaactgctcccgtggttataactgccatcatggatggcggtattgttatagcgaatggccacagactgatactctaggctggccagatggcagcgggccggtgcaaatgcagcgagcgtctgacgcagcatcgcggcctgatcgttagtaatgggctgtttcagaataacgcgataaaccgcccaggcggctgcatctccatgaacaaacagtccgttatagctgcgattgccgtcgtaactgagacgacctgtgccttcaatcagatccacttcaccaaagccaaaacggcggataacttcccggattgaccacggcgtccctttataccggtgcagttcgatggctgcttttataagcatgcggcgaacatcgtccgattccgccagctcccagccatcgccagacagtgagaactgctcgcccagccatggcagcgcagaactgtcgacgatatcgacgagaaagaccatcagtacgctcaggtcgatgttatccagccgccctgccagtcttcccagcgtcctgagactgatatcaccctcaagcggtggcgggagttgtaatggctcagtcatcagacactccactcatgttaagtgtgatcgccgtacagtttgcccattcgttttctgccaccaccctcagtgccggtgtcaccagttcaacctggtacaccccggaaacggacaatgcactgataatctggctggggacaatatcacgccccagcgtggcggcacgtgatgccacccagttctgtatggcgctgttagcggcatcttttacagacctggcatcctgatcacgatagatcgtaatcctggcttcaatggtgtaatccaccttcactggtgttttagcccgcactgtatcagtgagtggcctgactttctcatcagagcagaaactctctaccagcgtgagaacaccgccgtccggcagaccggtactgagcagcggatacagatctacggtcccgggaaccggggaaagcacagcaacatcgacaatgttgggatgggcctgcatggcatgaaagcggtatgcgccacggcttccggcattggtgaatgactccggggccagcctgatacgctcccggagcctgtcatcgtcttcctgttctgaaccgccggaactggccgtcagattgctcaccagcaggtcgacgttatcaatctcatcgagtaactgactgacctgcgcaggttgccagccgttaccagcggtaccgggttcggtacaggtggacgtgacattgaccagcagcaatccggccttcagtaccacatctgtatcggtggcaaaaataacgctgtcggaagcgctgacgcgggtgcctgccgggatcagcacatcaatggtcagtgcctcatccacagagaactgaagtgtggtggtggcaggctgcgcggcaaggcggtatacaccaaccagttctccgaggtaatcaatcatcggctctcgtgaaaaggcgaccagattctgctttgctgcctcctgtaccgcaaccctgaccagcatttcgcgataggcccacagatcaatcagcagacgttctgcctgtgccgggtacagcgttttgccggtatccgcttcatacttcgcaatcatttctgccgtgattttgtcggcatcgcgttcaataaaatcgggttctgtcagcgccatagcaactcctgagtccgggtctgtccgtctgagcctttccagctcacccggagcgtaagatgttcgccgtcgacggcgggtttaactgacataagctggcagcggggctcccagcgtcggatggcatcgacggattcgcgcaccacatgcggaatggcccggtctacaggccagtcgatataaagatgcagattgctgccgaactccgggcgatgcgggtcgctgccgcggggagtccgcaggataatttgaatcgcctgccggatatcatccagcccccggacaatttcgccgggagcctgcagggtcggttgccagaatactgaggttgttttcatgggggcagtattgcccccgtgcgggaacgctgatattaaaggcgtttaaaaagctcagtgggagtggtggctggagttttcgccatcagacaacatactgcccgtggcatgggcattccctttaatctcgatattgccatggatggtcgcggtaacaccttcaccaccagaacccgccatgcctccttcgtaaatcagcttacccctgacacgcagatctccggtaagttcggtttccggtgcgtcaatcgtggctttctgtgttttcaataccacatcagcaccacactcaatgacaatatgctcaatgccgccccggatgatcagagtgtgcgtcttccggttgtagctgtactctgcaccatcagcaaaccgggttccccggatatttttgtcactgaacggtggtttatcgacgtctgaatacaccgcgcccagaataacaccatcctcgccgttggcatcgagcagcacctcaacctgttcccccacgtcagggagccagtaatccttgttatcctgggtattgcgctgcagcacgttaagccagtttgtgcgcaggttatcgcattcaggcagacgaacgcgggcctgaaccctgtcggcatcaacggcgctgaccgtaccgacctgacgggtgacaccagtcattttttcttctccttaatcaccgtcgatgtactgccatccgggtgataaaccgtgagtttctgagttttttgttttttccctcttgtgactggcccccgtgccacttccagctctgtggtgtagccgctgttacgctcaaacgcatggcgggcagtgattatcagccatggaccggataactgtccaaagcccaccagttcaattttgttgcctgctgtcagttgaggcgttcccgtcagcgtcagggagccgttctgctggtattcgttatgtctggccagcgctgaatccgctttaatccgggcactgtccgggtcgctgacgcggctgttaactttaagtgagtcagcgctggtaaccttaccgcctttgagctttttgtcgctttcacgggtaccaccatcagcttcgtagacgatcagttttttactgctgcttttctggtgttttacctttgcagatttatagacccggttgatggtgtcacgcagggaaaagcaggccacatcctgcggttttaactgcctgaccggctcctgactgcgcagtgtggccagatgagaaaaaatcaactggtcactgaccactttcactgcataaccatactcgctggccagccggcgcagaaaacccacgtcggtttcagcatactgggtcacccggtcgattctgatggactcaatgctgcccaccagtttcagtcggtgctttctggcaatccgccccgcaacagctgccagcgtggtgttctcaaaaccacgactggttttagtccgcagggcactgttaaccgaggtggccaccccacggatagaaacaacggaagcgggcgaactcacttcgatctcgtctatagagaacgtaccgcaggacagcagcttctcgccctgatagcccattttcagcgtcagcgtgtcacccttgcccggataccatttatccagccagcggccatcggtgtcgtccagctccacctcaatggtatcggactcatttttgatgttatcgctccaggtcacacgggtgacataaggcgcgatatcagaggtgatgtttttctgcagataccacagagtgaacaccggtgtcagcacatcgctgacgccggttaacgctgatgtgacttgcgcagtgctgtttatctcagccatggggcaatatcctcttctgtacgggcttcttcagcctcaatcaccgggatcagtaacaacagcccggagggcagcaccggcgtgatggccacgtgcggattggcggcaataatccggggatagcccagcgggtcaccgtagtactgccatgccagcgaatcccagcgctctccgtcacgggtaacatgttcaagaaacatcacacactcctcgtcagtattctggcggccattgcacttaatcccggagacatgcggttgaatgctgtgccggcggcgttaagctgcccggaaacggtatccagagcacctgcaatatttcttttgtccacaccactcagcgcagactgtgcctgctgtacatacgtggctgcttcgctggctgttctggccagactgatggcatcgggcatggattcagagagtgcgttaaacgccggaacacttttccccagagccccggagatattacccagtccgctcatcagccccggcacacgggtcagtgcgacaacggggttatccttcattttctgtgtcacccgaacggcgctgatagtggtctggagtacagactgcgcctgtttcgcatagttgacgccgttgcggatgaactgcgccacccctgaaggtgaaggtatggcaccggagaccgccccgacacccgggagcttcgtgcgtattgccggtggttgcagaggatttttcgggtcaccggtgtattcccggagagacacggtggcactgacagccagcacgttgccggtactgtcagtctgctcgctggttgcagtcacatcggtaatcacgaaccagccgcgatagtcaccgttgccgaagaccagcgccagtgcctgatgggctttcatggctgttcgcagtctcgccagctccacatcgggtacacaataatgctgatggaaaaccagagttatctggatttcgtccagcctgtcgccgacgaactgcaggccaggcttacccccgatgcgggcatgctccgcataatcgacgccgaacgtggcctcgaagccgtcccagtaggtaatcagctcaaactcaatatcacccagtacggcaaacatcagcggtactccttacgttgtttctgagccagcagacgctccagcattttttccagctcatgcaggctcatattcagggcgccagtcagtccggcaggcgctgtggtttccctgccattgaggaaaaactgaggattaaagctgacctggataccaccagacgttccaccgccggttgcagctgcaccacggcctgaatatccggcagccatgatttcaggcgaggggatacggggaacatccggtgtcatctcatttgccagacgttgccctggtaaaatcgatgcccgggtggagagcgggatagcgggcatggaagacaaactattgattacggctccgatcgcatttttagcagacgacataaacccgttgatatcgggcaacggcatactgaagcgaacacctgaagtgttatcccgtatttctggcccctgaatgctcacgggcattttggggagcagttcactggccattcgctgcccggccagagctgcaagcggagtggtccgctgcaggccaatggcggccccctgcgcgatattgtcaccaaagcccataaacacgcggctcggcgaatgaatacccagcttttcactgaaccagccactgatgctgtcacccattccggttacactggatttgagcgactcccatttgtttttgataccgttaatcagaccgtcgacaagatggccaccgaagtcggtgaactttgccggcagatcaacaccaagatatttcagcgcagctgcaaaggctttatagagcagacctgccggcgaccagttaatcagcagcttaccagttcccgcgataccgccgttaaaggcttcctgaatgtcagcccagcactgtttaaaccagctactgatgctgtcacccattccggttacactggatttgagcgacccccatttgtttttgataccgttaatcagaccgtcgataagatggccaccgaagtcggtgaactttgccggcagagcaacgccgaaatatttcagcgcagccgcaaaggctttatagagcaggcctgccggcgaccagttaatcagcaacttaccagttcccacaatgccgccgttaaaggcttcctgaatgtctgcccagcgctgtttaaaccagccactgactgccccccagttgcggtagataaggtaagctgctgccgcgacagcggtgataacgagaccgatgggattcatcatcagcgcacgtccaatccagagaacagcacgtccggcgagcataattccgcgaaccagccccccggagagcacgccactcagtgttctggctcctctggcgacggcgctaaatccggtcaccagccagcggagcttaccgccttgccccagtgcgagcgacagacgaagccagttggcccgaagtaaaacagcatttttccagacacttacaaagggggaaataaggagattcagccccagtttgagaccaacagtcgctatcttaatcgcaaggagcgcactgatgagcttaaaagccccactgacaaattgcgggtgagtcgctacccagtgttttgccccctgaatgagtggaagcagttcctgagtcagagaaataaaagatggagctaattgatcgcccagcgtaattgccagatcgcgactgctgaccataagtgttttagtggcttcaaggggagatttcagccgctgatcataagcactggcaagcaaatcgttatccgcagccctgagagcaccggcacggatctctcgatatctgtccatgttggccagcatcgggcggataaatgccatgacctgcatatccgcgaacatatcgcccagaccaaagtttttcgccagagcctgaagtgcctcatctcttgccgtatcattctttattttcatggctgatttgaagccggccagcgcttcggggcttttggcattgaggtaacgttctataacactcaacatcccttcaatcggagagatccccgcagctttataactcgcaatagatccctgcaaatcaatacccagatcagcaaactgtttctgagtatcgcgggcaaaaattttggtaagaaagtttttaaaattattggctgcttcgtcggtggaacctgcaccgatttttgctatctggagactggccccgatttcagcaacagcctcttttccactggcaatacccgccatcattggggccagggactgcatccacttgacctgatccgggatttcaaatgacccctggtcaccggcataagccataatattctgaacggcaccaaaatctctggccgcacctttcagggagttttgccagactgcggccacttttgcccagtcctgagcagacgtgcgtgttgccgttgccgcgcgggcaatatccggcatcagaaaaccgatatctgacacattatcaatattgtcgctgatgagtgaacccaccgcctcctgcagctcatcctgatactgattgtatttaagcgcccagccttttatctgtccggcaagtgcatcccgcgttttattgtcatattttgcggtgatcgacatatcaatcattttgtcctgaaaagacatggactgctgaacggcaggggaaaccgtatgataaacagtctgtgccatgccatacgcttcaatcccctgaccatacagcgccatgcggttagctttcagcgcatcactggtagcggatgccgctgacagacggcgctgctggcgctcaatttgctccatggtgcggcttacccgcagcagctcgctgttgagatgctgcatccgggaagaacccagttgaccataacgttctgttgcacgggttaaagcgttctgacgttcctgcaggcggcgtgaggtatcgctcagggaatcaagcgcacggcgggtaccgctcattgcagaacggaatgtgctaccaatcatcccgccgataacaacgccgactgaaaactgtcccgacatagtggttaacctccggggaaggtgaaaagacgtgaggggataacgcagaacagccgctactggcggccgtctgtattatgatttgtcgccgtactcgctttttatttgctcttcagcctgctccagccacatctccagatcgtcagtatcgagggcatcaatctcccccggctgaaaccggaaccatctcgccagcagcccctgcgcctgcgtcagcgcctttgtcgctctcacccatccccgtgatgagctgaaatcgtttctgtaactgcaggtaatcagccaggtccatattgtcgagatcttccgggagaagaccagtactgcgggcaatcagcggttcgtcccagtctgccgggtttttgctgattttgcgcacctgcttcaggtcttttaccgtcaggcgtttcagttcaaccagctcaattctggtgcctgcagcagtggtgaagggataagacaatttaaaagtatcggatggggtctgtgacatgattgtgctcctgtgtaagttcagggcagtatgtcgggagaagcgcgtgacggatattaaaggagattaagaagaaggggccggagcccctgtgatgtcagcaagtgcgaaaccccttgcagttacgcaggaaagcgatgagaagcgtctttccctcagatttgccgatgccggagaaccagtggtcgggaggctcccatgcttcaatcaaatccgccagtctgcgggcctttgaacgtgtgcagtcaatcgggtcattggttttacgggtattaaaaagggtttccacccccggaatatcaaggagggtaaaccacgtaccatttgacatgcccagtgccgcacatcgtcctcctttatccgtcagttcaacactcaccgtcagcccccgatattgatacggtagtcagtcagttgatcaacaccgccgacccggaagatgttggccagatagtccagttgcagcagctcttcaccatccagtacctgtctgatatacgtgcatgtgaagctactggagaactcggcgttctcgtgctgtttgaacgtccccagcgggttcttcttgaacataatcgtcaggaaggtgaccagcgggatttcgtcaatcagcccctgcgagctgtagcgctggacgctggaacgacactgcagtgccagcgacctgtacgggttcgcggcagacagcatcgcatcgcggtaaaagctgttccatttgatttcgccttccagtttgtcaaaaccagccgggagttccaccttacccaccatccccagcgccttgtgttcctgcataatcatggagacatcggggagtttaacttcctcagcccgtcccagcaggttagtaccatccagatagatgttggcattcgtgatgcggtttatctcaatctttgacatcagttgccccctttcagggttaacaggtattccgaggtgatctcagtctcaaacgtcagtcgctccagcggcggtggtggcgtatatttgtagctcagcaacaggtgcccggcggccagctccgtctccggattgcgggccggatcaaaccagcaacggaagcccagtaccgcaccatcaccagtcattttgcgaccgtaggcgttgaccgactccgtcagtgcatcaatcagcgcctgagtaatcggcatgtcgatgtactgctggctgaaataacgaatggactcgttgatcacatcaccggtgcggcgaacgttctcaaagttacgcatatgggtgaccgttggccatgctgccgtccggttaccccacagacgaaggccgctgccgtaactgctgaataccgtggtgatcccctgttcgttaagcaggttcacctcactctgcgggtcatcaatcatcgcggacagctggcgctccacgccggtgatccccagaatctcctgattggaggatgaccaccagtagcccttgtccagatcgactctggcacgcagacctgctgcacgctggctgagcggctccagacgctctgtgtttgtcaccgggtcatataccttcacatgcggatagcacagacggacgcggtcggagctggtattgaagttgatggtgccttccgggccacgacctgccagagcctgtgcaaaggtggtaccgacaggcgcatcaatgtaggttaccgcgcccagcttctctgccatggcgataagctcaactgcgacactcttctgggtgcagaacaccggcgcaatcagaattttggcgaaatagccgtacaggttgaagctgtcgttaagcagcttcatgccggttcggtttccggcgctgttcaccccgccgatgatgtccgccgcagtcaccttcgacgggtccgcgtactcatagctcaccttcacgctgccaccggcctcaatagccttgcccaggttcgtgagcacacccgcctgcgcatcaacacggtagtccgtgttcgccgtgtgggtggtgctgccttcactgtttttcaccaccacattagcgacaaccggatgcgccagtctggcctgccctgtcgatttgtcaaaggtaaccacctcatcctcgatcgccgttttatgtttcgccgggtcgaggacgttaatgaccagaacggtacctgcaccatggtcataaatcgcatccagcgcctgcggaatggtaaagccggtgaactggctgccaaatgccgctgcgtctttctcagacaggcactgtaccagcgtattgacatcccccatcggggcggtaccaatcaggccaataacggcagatttcaccgttttaaccgggcgggcaccgttttccacctcaatggtttcgacgccatgcagatagttagctgccatgggtgtcctccgttttcacttcgctgtcactgctgcttctgcgctttggtgactgcacagccggtgtgccggcgggtttagtctcttcaggtaccggcgtcagatgtttcagcgccaccagtaccttcacgtagtcatgctcctccggcagggaaaccgtcttccccggccagagcaggatttcggttccgtccgacagcgtgacgccgctggccgggccggaatagcggtattctttcatcactcgctttcctcatagttcacttcggttaacagcgggccggacggtaaatcgctgtcttcgataaagacgctttcagtcgcgaagtcgagggcgtactgccacagccccctgacttcaccgataaacacctcgcgggtcagccagatacggcggcggcagccgggcggggtgtggccaccgagaatgcggcggacagcatccaggacattaatcgccccttttttaccgttgagctggcggaagaccaccgtgacgcagagctggatagtctgagactggatcaccgcaccggtatcatccggcctgtcaaagcgcgaaccggcatagctcagcagcaacgcgccaaccggatggttcaggcgatattcagccggtttctccgggaagtactccacctgcagttgcggcagcttctcgcgtaaccgggccagtaccgcatcaaggacgggcagaacgttcatcagtatttctccagtaaaccgtcacgaccgccgaaagtggccgggcgactgcgtacacgaaactctcctggctcaggcacatcgttctgagtggacggcagccccagcgtaagcctgttatcacgtaactccttcagttgccgcagcgcttctttgtggtcatccttcaccgtatccgggaggtcaccttccgggcggcgggcgtagagccggtaacggaccagcgtgatggcaatgtcccgcagaacagtcggtatctctgccagtggcaggatatagcgtccgcgcagatgggcatcaatcagctcgtcggcatagcggatacagctgtccaccacacgggtattcactgttgcaggcgagtcgaagtccatctcttcactggtgagctcgatcagcgttcgttccggcacctgcgcaagcaaatcctccagggtgcagtacatgtcacaccccgcgcaggatacgaatgacgtcgccttcacccccggcttcatcaagtgcaataccacaggatttaccgtcgccggactgcggcacggctctggcctgagcatctgactgaacagccacaccacggctgacagcggccccggcctcgacagcaataatgcccagaacgctcaccggcgtgctgtcgccggtaacagcatccacttcggcaaccccgagcgctgcggcaccggctttacagggggtattatctgccccgacaaaacgctgctgtgccagtgctgcccctgccgttacggttgtgatcagaatgacctgctgagtggttcccataacgcctccttatttactgataccggtaatgagatacccggcatcgccaccaaccacggcgactttgtagatatcggtataacggcagtacttcaccttgccaccggctccgtcgtatttgtcagcaacaggcatccccttacgacgcagggtgtagccgaaggacggctcgttctcgtccgcgctgtccgccccgggctgcggtttgccgacatagtgcagcatcaggttgtctccccagatatccgccggcacgctgtccttatccattgccgctttcatggacggcagggagacaggcgcaccgatgacgatctcttcgatctgaaagaggtcctgcaggatttctgtggtgatgcgcttgcgttcgttggctccgatggcagcctgaagtgccggatggaacttcagcagcgccatcacgccggcacccatggtcatcaggttaggacgcagccccgtggccgtacggaccgcttccataccggcttcaatcaccccgatggggtcccccttaccaccggcccagcgatcactggctgtcagttttttaacgtgcccggtacggtagaccttttgatcctgagccagacgggcggcgataagttcacggcgcaggttcacgccattcgtggcgcgacggatggccttgctctcttcgttaaacatggactccgcctgttcgcggtaatccaccggtgctgccagatcgtgttcacccagcaccagatccagtgtgccggttttctcacggaccagaacattgctgtccgccccgacggcacgctcagtgtcatattccacaaaggcggttttcccgaaggtcggcacacgcacgccttccttgtccgtcagcacgacggggaaaatacgttcgccaatgaatgcggcatttttatagcctcgggcgatactggtcagtaccggatcaacgacacgtttaccttttaagtaatcagacatgatttctccttaaattacaggcagcgtgcgacagcagcctcatagctgatgccttcttttttggacagggccactgctttctgatgcagggccagacgctcaggatcggcttccgcaaactccgccacatccaccttcaccgtgtcgccgacacgctcctttgtggcctgttcggcgaaattcatcaccggctccccgtcggagagcaatgaacggaaggcggtggccagcggcgtgcggcgttccccctcagcaaactccaccggcttgtcgccaccggcgacggcatccagcagggcaaccaccacggaggaggcgcggggagccagacgcccctctgcgaccagtttttctgcaaaggccacattgtccttatgcagttgctcctgtctggcctgtgcatcacgcgcatcgcgatcagcagcctgctgcttcaggcggcggttctcctcctgaagggcttcaatctcttcttttgtcatcgatgattcctcgttacttgcggaagacggcacctggcctgtctcactgaattgtgcacctgctgcatcctgcgacggtgcgtcgcggtacgcctcttcgcgcagattgttgagctgccattccggcaggactttttctgcctcgtccagactgaagcgggcgatcagaaaatcgcgcagctttccccacagggaggcattcgtgatggcctgccagtcggcgaactccaccacaccttcttcctgctcactgaaggacacctgtttcagccccttgacggaaggtggctgtgccccgagaaagcccacatggcgaaggtagagcacgccgggcttcggattggacggtgaatccgggaggtagaaagaggcggacacttttttgaatcgtccgtcggtgaccatctcagcaaactgcgggtccagctgggcaggctctgccatcagatcgacgccgctgagcgacagggctttcacccagccccacgccgggtcttccgttctgggatgaccaatcacgagtggtgcttcatggacggacgggtcataggctttcacgcaggcggcaagatcgtctggcgtgaacggcagttttttgccgtgcatatcggtatgagtaccggctttaaaaatgtgaatggctgacattttgctgtcccgcgttatgttgtcggagacagtttgtgagaaatgcaggcccggcgattttaatctgctttagaaaacatcaggggagaaggacagggaaagcaatgcggtgaaccggaagcggttataaaacagaggctgtaaagcctttataaaggtaatacagcccctcattcgctggcaatgataaatcacccgcctgaagagagaaaactcagcgacgggccgctgattcaagatggcggacaatggtatcgaggatggggattaccacttcaggctgtagttctccatcccccgtcaccggcaggaacgggcgggccggaagttcaacagactcattacgccccgttttacccccgaactggtgaatggcaccgtaaacaacgttggtccccacaacagcctgccggtcgtcatggtcggttgatactgaccccatcagacgcccggtatcctgcagtgtctgcccgtcacgttcttccgctgccagcgagggcatccaccccggacgcccctcatcaagaaagttaaactgtgtttccgccagcagggttccggcaattttgcgcatcgcgggctccaggtctgtggcagcaagatccagcgcacggaggctccggcgcagggatttatcgttaatggtgatactgaccaggttatcggaagccattgttatcctctcagttcctgttgtgccagtggctgaagcgtaccctgatagcgggccaggtcgggacggtatgctgcccccggtgcataagaccagccgacgtcggtggtcaccttcgtggtgccggtattaaaggtggccacgttccgcatttcgccggttttctctgagaccagtttcagttcctggcccatggcagagccggagctgataaccttcaggccacgggcacgtacatccgccgcactcagggcaatcacactacagcggcagcgccagccgttcggcgggtaaaatgcctgccagaacgggtcatcccagcgcagcaccagaccatgcagcgccagatggctcctgcgggtatggctgtcgttgatgccggtatacatccagtacggcctgtcgtcgacgttttccatctgctccgcccaacgaccggcgctgtagagtacggacatattggtgcgaaagatggtgtcgagccgccacgggctgccctgctgaatggtgaccggctcacccgttaccgggtcagtcgtgtcacgtggtccccaccatcccttacgcttcagcaccggctccagctcctgccggaaccagcgatcggtttttccttcatcgacagcctgctgcagtgccccgcgaatatcttccagaatatccaggcgggtcactttagcgacggtaaaggcgcgggcatgggcttcctgccacatttcttcccagtcccaggtaatctgataccctttggacttcaggtaactgactgcccgcttcgggggaagcgtcatgcagtacgccagttcagccgttgtcacgctcatgcagacgcccccagatatttgccacaaagagaatgcgggccagccgttcctgcagatcgtccgtgttcatctgagggtagagctccgccagttcgcccagcagctcagacgggttaaccccgttttcgacccgcttaaacagaggtgccaggacgggttccagcgtgccatttaacacacctccgttcatcagaatgtccagcgcgtcgtcaagctgctgctgagcctgaatatcggcatcaatcgcctcggcaaatgacagcggcagcatgttcttctcgcgttctgacggtggtgtctcgtcaatatcgccgtcctgcagctggtactcacgcttgaagtattgcggggtcagacgcagacccgcccgggtgagtttttcgtcgcgggtggcacgggtgtcatcaatggcctcctgttcccacatggcccagaccggacacggcacatcgccgaagttcagggtgaccaccgttctgatgacctgattcactgccgcctgaatgatgtccgcatccgcatcgcggatatcagccgttacctccagcccggcctgtgcagaggccttgttactgttcgcttccgtggtctgattctgaccgagtaatgcaatggagatctcactgcgtgacagcgtgatcagctcgcggaatacctcgctgctgtccgccttgccatccgcggctttgagttcgatgctgctgtcatcggggatggcggccaccgcgtcctccaccatctgctccatggagtccagcagtttttcaatctctgcatcatttgcacccctcgggtgcttaccgatcacccatggggagccaaacttttcggcaaagcggagccagaatttcatcccgcctttcttgaaggcgaccggccagaagcacatggacaggtcagggaaaccgtaaggattgtcatacgaggcatcctgtgccggcaccacgaattttgacggtgacagcagctcaccctccacacccgcatcacgcgcccggaagcgcaggcagttgtccgtatcaaactgaaaccactcaggcggtttgccgacaatatccgtcaccgcccacgccctgaccgaacggccccacatgatttcacagggctgatacccgtagagcacggcatcgctcatctcaccgatgatgcgggacagatccagatcgtcgagcatgtcgcggatgaaacggaagacccgggcagaagcgtgaccgcgctccagtccacgctccagtgatttgagcgctgctttacgtctgcggatacagcccccgaccagcgggtcggtgcgcagttcgcggtagatacggatatcccgtccctgagccttgagaatgggatcagggttgggcaggtacattcccagagcgtaaaagtcgatggcgcgactgcgcgaggcaatctgcgcggtcagtgattttttgggttcggtgaacgccacgaactcatcgggtgaaacccagataccttttgccatcagaatccctccagcatgcgggcggcttcacggcggcggcgcgaacgcgccaccaccggccctgacggtccgtcagtggcgttaatagccagaaaacaggcccatgtacggtcggcgtgacctgctgcatcactttccgccacaaagcgaggcgctccggtaggtccggtgatcttacggagtttatgcagatcactgcgcagtaccacatctcccgccggaatacgcaggcggcggtcctcaaacatctccctgccacgggtcgcgagggtgagcttgttcgggctgttaaatatcaccccctccacacgactcctgccgtggcgctcctgagcatcttccacaggcttttcccccattcctgtctgatccatacagcagcgcagcacgcgataacggaaaaatacgtcatccagcaaagcatcctgctcagcaaaggtggcccgtttacgggtgatgatttcccgggtccagtagacatcccccacctgttcaagcacccagatcacaaacaggtcattacggacagcaatatccacccccacaaagcaggggccacccgtatagtgcaccggcagtccggcagcatcgtgctccacgccgtcaatcagttcaaacgtcagccaggccgatgcctcatccagccacttcagttcaaactcctgtgcccaggcgtcatcatcgttgagcgcctgtcgcatctgtgcaatgtcacgcggaaggccgtcgcgcacggcacggtaaatatccacgatgtgacgtgaccagacattttcaagggcgttgctggtcatcagttcataaaacttgtttcccttgccgttcggcgtcgatgtcacacgcagtctgtagccgttggaaatgaccggaaacagggcggtccagattttgcgactgtcggcatggaaggcgaactcatccagaaagacgttagccgcaaacccacgtgccgtgtcgggatttgccggcagggccgtgatacgggagccaccgggtaactccacctcaagcatggtgtagcgttcgccgctttcagcacggtaataactttccacctcacgggccgccatccggtaggcgctgcagtgttttttcaccccctccaccatggcttcttttgcctgacgctccccacgcgataggatcacccagcgagtgcgtccccctgatgcctctgtttcaaaacagtcatcaaccagttccagcgtggtggtgaacgtcttgcccgtctggcgggcaaacatgccaatcttgaaacgggcacgatccagaaaccacgcctgctggtagggatacagctgaatggctgctgtcatgagatcaccccgtaaatctgttcccgcaccatcttcagggtttccagactcaggcgggtgtcgccggacttcgcctgtttttccagagcattcatccgcgcctcaatttttgccagcacctcggcccggaatcgcttgtgggtcaccgaagcacgtaccagtgtggctatactttccgaagcagtggccagcagttttgcgcgttttgcagggtcatcattttccccgatttcctgcagacgcatcagaacatccagcatctcggtctgaataagtgccatcatcccggcagaacgatcgtccgcctcgtcaccggcttcctgtgccatcagacgcgcggcctcggtggcggcgcggatgcgggccagttgtcgctccattttgtagccaaaccgctgcagggaagagcgggtgatgacgtatcccttctccttcagcagggcttccagccgggcatatccactgaagttattctccgtcagtgcccgctccagccagcggcggacctccgtcggcagagaatcaatgctgctgcgacgtcccataatcactcactccagtatttttccgggcgggcaatacccgggccgcattccacggtgtattccacaatatccacaccaaggcgactcagatcggcaaaccagtcaccggacggtctcttctccagctccaccattttgcgatctgccagataatcaagctcccggcgcagctccagttgcgtggtgtccgggtagatggcacgggacacgtccagcagcaacgtctcgctggcggtgtaagggcgggttttgttcagggcaaccagcagactccagcgcagggattcgcggcgtacccgggtaatatcgaccattattgacctccggtattgcggtactgctgtaccacttccagtttgttgtaaagtgcgtccagtttggcctcgatgactgtctggccacggatataatcctcgcgacggacataattcagcggtaaatccgctttaaatcgcatcaattctttttccagctcgccccaactggaggcggactgctgcagtgactgctcaagagaggcaaaacgtgcagcctgacgttcctccgctttattgaacagccatttggccataccgccgacaaagctcaggaaggtgatgagaaagcccaccaccgtccagaattcaacctgcagtgtcatttctgtaatccttcccgttcatccagcagcgcgtttatctggtttcgccagcgacgacattgccctgcgttgtcgatgatgttggcgagaacgtcacgctgggagacgcctgaatcgcgtagccaggcgtcagcggtttcaggttgcccggtcgctgtgccagtgcgggtgccagtggcggcacctgagtctgaatgaccggtgtcggcggatgcgttgtcatacccgagtgcggcgttgtactgacgcacgaaaccgcgagtaaacacgcactcaatgggatggctcttacctttttcatcaatccagcgctgtgtgacatcgttaatttgcccctgtagttgtttattccggctctccagttgagcaatctgctcaaggtaaccgacttcagcctgctgcccggcggccacctgctcctgataccgttttgcccaggcccgcagcgcagcattctcaagcgttgcctgctccgttttgtacgtgtcgaacgctgactgcaactgactgagcgcggtatcaccgtcacgctttgcagagtcatgaccacttctgtatcccatggcatacaggccgaccagaaaggcattgataagaatggccagcagaatgccgcgccacggcagctttttaaccagatgccacacaactgctgcctccccatgtgagatatcgcggtgccagttcgcgcaggatgcgctgcggataatggcggttctcccgccagctggccgcattgcgtccggcattcaccgtggcgacatgtccgaaccagcgggtgctgtccagcccctgctgcgaggccagccgtttgtcccgctgtacccagcccagaccaccgttatagcctgacagcgtcatggccatacgctcgcagtcactggcggcgctgacgcgttgccacagccagcggtcatagctgaccagcgcccggatggcccacgccggattaaacggttcacggctgttaagccccggcatcagctgacttatccagtcagcggtggtgggcataaactgcgccagtccctgagcgccagccggcgagaccgcatcaggtcgccagccgctttcctgatgcagctgcgcggcgaagtcggccaccggcgcagacagtccccattcaagccgggcattacggatcacatcatcgcgatactgcagcgcaacctgcggaggctgcgctgcgcatgcctggctgaaaaagccgccacaccagagcaacattgcgacaaagaatacccatgccatatgaaccagaaaggtcccggcgcggactgacaggcgttcggttctgatgaagacccgaaaggcttcgaaagccagtttcagggacatgcatacaatccaggtgatctgcggccagttcatgattaaagccccatcgcaacagccagacagacagctgcaacaatcagtgcacggcggattaacgcagcagaaaatacaaggtgaaggccggtctgcacagggaaacgcccttcagccatcagcctgtcttcatgtttcaggtactgaccgggacgggctttggggaagagcgaacggtcaagccagtaacccagcactgctgccagcgtgatgagtgccagcttgtagatcacaacaggcaactgctgtggcgagaccagagcgatggtgcccagcagcagcactgaggtcagcagccagccgctgaggcgaggttttttaacagggggaatgaattttttcaggtttttcatgtgtgtctccttgtttggtggagacagcatcacaaatacagggcgcgaaggattttaaagcgcgttaagagagccgaggatacgggatgtgcaggataaacgatgaattattcacagaggagaatacgatatgacgcacacactgaatccggtcatcactgtcactgtgtccggtcctgtgggcagcggtaaaagttacgtactggcgcggatagaagagatggtgaaacaggaactcggaaacagcgtcattgtcgatgctgctgacgtggagaatgagcgccgtatgaatggcgatgatctgacgacctggcagaagccacggggtggcacagtgatcaggctggaggaatacacgggacagggcctgttgtcatacggcgaggagcgtatctgtcggacgaatgagctgctggatgttatatgccctacgggccggcaaccctggatactgcccgatgcactgcatgccaccattgcggcgctgataacagtttacgatcaggagctcgttttgatggagttacgccaggtagtaactggaattcagacgggataaggattttaaagcacgctggaaatgcattaaggacataatcaggcggaatggtggagccctgacaccagatcattattcagcagttaactcagacattgctcgtatctttaactcttcgtagcttacttgcctgaaaatccagaaccggggaaaacagacgctgccagaatccaaccacaatcatctggtctttagggtaatccattgacagtatctgctcgttgtaacagatactgtcaagaacgcgaagaactggcggttcgtctttttcaatagacagacgttccgaagttatcgtccgcaggctttcctctgtgatttctggcaccagaatcattttttgctccagctcaaaaaacttacgagcgaaatcaaaatgagcacgagctcgctgtgatgaaccaacaaccagattgatggctgaaaaaatcgtcacaacagcagcagaaagcatggctaaattcttattgctctgggacaaaacaccatagatcgcagtagaaccaaaaatcagggacaatacatttgtggcctgatccaatcgatcaaaccatgctctgcgacgattatggtaacgaacggaacgtctgacatcaaacaacaggccttcccattcacgagccagatttgtcttcactgttgtctcctttctccgggcgtactggcggtgaaaatgagttagttacaataatacccttgtatccaccgtagtccagaggactgtattcgccatactccagagaatcgtccttgatactttctcgtgccgggcgcggacgattgtcaaaccctgacttccgggtgcacggtttatctggattatgtttattatcattcattggctacattctctttcaggttaaattaccgaatcagtaaactgcattaatagcagtcgagtattcccaagcttcactatgacgatgaaagaacgaccagcccggtacccgaaatccgggctggccatcgtcccacagaagtggctgtgagccgaccgaggttcagtcagtctcgcgagaccagactagcctgccatatttttaataattgtaaaaggcttacagattatgaaagaacaatctttacccatagtcccctggattggggggaaacgtcgtctggccaaacacattctgccgttgtttccggcgcatgaatgttatgtggagccgttctgcggcgcagctgcgctctattttcttaagacacctggtaagaccgaagtcattaacgatatcaacggagaactggtgaacctgtatcgggtggtaaagcatcacctggaagaatttatccgccagttcaaatgggcgctggtcagccggcagatctacaaatggctgcagatcaccccggaagaaacgctgacggatatccagcgtgcggcacggttctactatctccagaagcaggcgtttgggggcaaggtggcagagcacagcttcggcacctccaccacatccccgccacgcttcaacctgctacgtattgaagaagaactgtcagcggcacacctgcggctttccagaacggtgatagaacacatggactggcaccagtgcattaagcgttatgaccgtccgtacacgctgttctactgtgatccgccgtatctggggacggaaggctatggtgtggattttcctgaagggaactactcgcggctgtccgagctggcccggagcatcaaaggaaagatgataatttcggtgaacgatatcccacagatgcgcgaggtgttcactggactgaacatacagacagtgaacatcaactacagtctggcgggcaaacccacgccgcgccgtgaactggtgatctgcaatttctgaaattgccataaccggaaagcacagtgctttccggtaagccagcctatttctgccatgctactgacggcgctttctgaaagcgtccagatcaaccacctgtcctttgtgtccgggtcagaatcagcctgcgagtttgcttggtttgggttgaatgaagactttgccgacctcaagaattgccctccgttgttcggggctcatttcgtcgaatgcatccattaactctttcttttcttgtgacatataaggtgcaacaactggctgactccgcaccccagtaactacatacaaaacatctacaccgatttctgatagtgcagataactgcactgcagtaggagatgtgcgatctttttcccaatcaataaaagttctctttgccacaccgatagcatcagccaacccttgctgtgtaagagatagacgctctctttcttctttaatacgtaacccgatcatgtgagtttttctgcactctttaagttgactggtgagataatctgcaccataatctatcacacataaggcaaacatcattgcatcaacaaaggagacaacgatgactgcagaacaagtcaaagctctcttccgccagcgcgggatcactttcacccgctgggcagaagaaaacggctacaaccgcaatgaggtataccgcgttctcaacgggcagaccaaagcccgttacggtaaatcccatgaaatcgctgtgaagttggggctgaaatcaacagctcaggcagcctaaagattttgagtctttgtaaaaggttatcacatatcgcaaaagaggcatgcagatgagtaagacgaatgtttcaagctccggcggtcgcatcctccgggtactcaaagcgctgcgcggtcatgccctgaacggtatttccaacggtgaactggcggcagcactgcacgagtcaccggcaaacatcaaccgggcactcaacaccctcattgaagaaggactggccctgaaactggaaaacgggcgtttcgcgccgggcatccagttactgcagatcgctatggcccacagtaatgagatggcacgtgcacaggatcgtattaatgaaatcaaccaacgtgtcatttcaggtagtcgtttataaggagtaatcaatgggacgtaccaaatcaccggttaacactgaactgaacgccgaggtaccgctgtcggatgatctcaacgtcagcctgaatgccatgacacagcatcgcatggagatcatgcagcagtttggtgatggactgccttatgaacgtgatcgcatcgttcacgaagcacgtttttatatggcgcagagtgctgaatctatgctggaagcgggtaaacggctgatcatcttaaaagaaaatgagccacacggggactttgttggaattgtagaagaacaacttggtttgcacgtgcgcgcagcacaacgaatgatgaaagcatctttgaaatacctttcaccaaaactagagccaaaagcgacaacgttgtcgcttttgggtaaggcaaaattatttgaacttgttgctgaagacgatgaagaccttgccgaactggccgacggcggcacagttgccggcctgacgcttgacgacgttgatcgcatgtcagtacgtgaacttcgccaggccctgcgcgaagcgcgcgaaaccaacgcagcacaacagcgcgtactcgccgacaaaaatgaaaaaatagattcactctccaccagactggagaagaaatcccgtattcagccacctgagcctgatgaagaggtgaagaaactgcgggcggaagtgaccgcgttagcggttgaggcggaatctgctatcgccgtccgactgtccagcgcttttgagacgctgtgcgcatattgtgctgaaaacatgattgatacccccagagacttcatggcaggcctggtctgtcaactggaaagcacagcgcgtagcctgcgctccacatttgacctgccggacgagccaacaggcaatgcagcgccttcatggctgactgagccgacgccacagattaacgggctggaggcataaccaatgaatgctgccctgactgaacgactggtttatgtcgcccgcgcggcacgtgacgcggggcatggtaaacgcggtgcaatatacgacgctgcctgtgctgaacttggcatgtcccgcgccactctgctgcgcaggctgaaggaggtctctgtgactgataaacgcaaaaaacgcgccgatgccgggcgcagcgccctgacccgcgacgaagccgcgctgatatctgccacactgcgtgaggccacccgcaagaacggtaagcgtctctattccatcgcagatgcagtggaaaccctgcgggctaacggctttatctccgcaggcagaacagatgaaaccaccggtgagtttttcccgttgtccgaagatgccatcagccgtgccctgcgtaactatggcctgcacccggaacaactggatgcccctgcgccgcataccgaagtggccagtctgcatcccaatcacgtctggcagattgatgcctcgctctgcacgctttactacctgagcaatggacacaaagggctgcaggtgatggacagcgcgaaattctacaagaacaagcccgctaaccttgcccgtatcgccagtgaccgcgtgtggagttatgagattaccgaccatgccagcggctggatttacgttgagtatgtgacgggtgcggaatccggtgagaacctgtgttctgtgcttatcaacgccatgcaggagcgtggcggcgcagacgtgctgcacggcgtgccgaaaatactctatctcgaccccggctcggcaaacaccgcgggtatgacgaaaaacatgtgccgctcactgggcatcgacctgatagcgcacaagccgcataacgcccgcgccaccggacaggtggaaaaggcgcgtgacattatcgaacgcaagctggagccgggtctgaagttccggccggttcacagtctggaagaactcaacgcgctggccgcgaaatggcgcagccactttaacgccacggctgttcacagccgccacggtaaaacccgcacggatatctggctgaagattactgctgagcagctgaaaaaagcgccttccgttgaggtatgtcgtgaactggctgtggcggcaccagaactccgcaaagtcacgccaaaacttcgtgtctcgttccggggcactgaatttgacgtatcaacggtaccgggcgtactggtcggtgaaaaactgatgattacccgtaacccgtggcgcagcgatgtggcacaggtggttctgaccggtgaggacggccacgagacgttcttcctggtcgaagaggtcagaaagaacgagtttggctttgctgaaggcgcggcggtatttggcgaaagttacaaagccctgccggaaaccccggcgcagatggcggcaaaagaaaccgaagagctggtcaccggtacagacaacgccgcagatgcagctgccgcacgcaaggcgaaggcgctgccgttcggcgggcggcttgacccgtataaacatattgatgacgccacacttccggcctatatgccgaagcgcggtcaggcctctgacgtacgcgggccgcgcactgaacaacgtcccatgactcatgtggaggccgcgaaagccctgcgcgataagttcagcgccgacggccttacctggacgccggaacattaccgccagttaacggcacagtacccggacggcgtaccggaagctgcactggatgaagtcatggccacgctgaccacgccggcacgcagcagtgttatcagcattgttaacggcaactgaggaggaaaacatgctggtactgaagcagcaactgaaagaggcccgtatctcacaggcggtggtggcgagagctgtcgatgtttctgaggccacgctggcccagattgtgaatcataacgcgtggccccgcacccgccccggagaagtgcgccggcgtcttgcgtcctggctggaaagtcaggggattgatacaacgaagagttttgatgctgtacagggcgcggccacgccccgtacagcgggtaccacagataaaacgagcctcagtgaggaagagaatatgttactcaaaaaacaggtgttatttccagcaaccaaaaaagcgtttggtcttttccgtgacccattcgccgacgaagccatgcagggttctgatgatgtgttcaccaccccggatattcgctacgtgcgtgaggcgttgtaccagacagcccgtcatggtgggtttatggccgtcatcggtgagtccggtgcgggtaaatccacgctgcgccgcgacctgactgaacgtatcaaccgcgagaatgcgccggtaattgttatcgagccatacatcatcgctatggaagacaacgatgtgaaagggaaaaccctgaaggcagcagcgattgccgaagccattatcagtaccatcgcaccactggaaagcatcagacgcagtcaggacgcccgctttcgccagttgcatcgcgtcctgaaagacagcagccaggcggggttcagccacgttctggtgattgaggaggcccacagtctgcccattccgacactgaaacacctcaaacgcttttttgagctggagtccggtttcaaaaaactgctgtccatcgtgctgattggccagccggaactggcgacaaaactgtctgaacgcaatatggaagtccgtgaagtcgttcagcgctgtgaggtggtcgaacttctgcctctggacaataaccttgaagagtttctgacgttcaaactgcaacgggccggtaaacaactgacggacattatggacgccagcgcagtggatgccatacgtgcccgcctgagcaatccgggaagtcatcgtaaaaatatggtcagcctgctgtatccgctggccgtcagtaacctggtaatagccgccatgaatctggccgctgaaatcggggttccacaggtcaacgctgacgttgtcaaaggggtttaataatgaaatccaccacaggtatcaaccagcaaatcagcaaagtgcagtcagccattatggcgcttaaggcgacgaacacggatgtacaaagcatcaccatcaggggtaacaaacctgtcatccgcgtttcccggagtgcgcattgcatgcgcatgcttgagcagggaaaggcctgttatctgtataccggtcatgaccacaggggacatttccgtcagggcgttttcgaactgcacggctgtcgcgtcgtgtggccggaatctttgtggtaatcagcacaacaggaggagtcataaaatatggcaaaaagtacaaaaggggcaaaacgtatcaaagccgcagcagcactctgggtgccggggacacgcgaagaggtcattgagggaatcagactgcttggtgacgcgcaacgtgaactggtcagggctgaaacagaaatgaatgacaccattggcgacatcactgcacgttatgccccgctcaccgagagcctgaaaaaacgcatggccgaactgcagtccggtatccagacatggtgtgaggcgcaccgtgatgaactgaccggcaacgggaaggtgaagttcgctaacctcaccaccggcgaggtgcagtggcgaaaccgtccgccgtcagtcagcattcgcggggcggataatgtcattgaactgctgagacgtctggggcttgagcgctttattcgtgtaaaggaggaaataaataaagatgccattctgaatgaaaaagaggctgtgaaaaatattcccggtattaccataaaaagtgatattgaggatttttcaataattccttttgagcaggatgtgcagtaaacacaccacgttaattatttaataaaaacattttcttttttattccggcgtcagcgccgcgggcttctgcacgccggaaacagaggagaattaaattatgatatttaaatgtattcagtgcgagagggatataacagccctgcgttttcacagcgccatcgccgtgatgtccggtaagtatcacatacctgcagtacgtgtcaccctggtctgcccgtactgcagccagcatttttcggcggacgtgcccgtcatagaattctcccgccctgacagggaggacgcgcaatgattaccccacaggaagcacgacagcgcacccgaactcttgttgaacactatgtcaacgagtgtgaatgccgcgacctcaccgatgtgaagcacgtcctgacggcgctaatcagcatggccacacaggccattgtggcgaccaacggaaaggaggctgccctgcaggtactgatgaacacactcacccacacggcagagcatgaggtgccgtaccggatggaaaccactgcagaaggcggcctgcacatcaccgtcagccggaagcactgagggcgcggcatgacacgaaacaccgaactcacccgcaccgccctctaccgtctggccctgcagcgtttcgggccggacgcacaggccctgaaactgacagaagaggccgctgaactggcggccagtgctgcccgcaatctgaacggacagggcagcgaaagtgacctcgcggcagagctggcagacgtggaaatcatgacagagcaactgcgccttcaggggatggaccggctgattgacttccacaaacagaaaaaactggaacgtctggctgcacgactgggcgtgatttacacgaacgagtaaccgggaggcattcaatggctgacatactcagggaaatcaccgcatggacactgattcttactggcctggcgacatgcctcagtgcgggggcagccctggctgccctgctgatgcacataacaacacagtggttatgggaaaagcttaaagcagcatacagcctgaaagagctgtccgacgctgtccgggcatggaaacggcagaaaaataccggagatacagaacaatgacagaccagaataaacacattgagaaactgaaaaagttgctggcgctggccgcatccggcaacccgcacgaggccgctctggcactgcgccgagcccgtaaactgatggatgttcacggcatcacacattccgacattgctatgagtgatattgatgaaaccatcagtcattactggccgacaggcagtctccgtccaccgcgctacatgctgggcctgatgaacatcatccgcgaggcatttggtgttaactccatcattcaccccggcacgcatccgtctgtggggttctacggtaaccgggaacgagcggcactggctgcgtacacctgggaagtgctggtccgccagctgaaaaaggcgcgtcagcagtatatcagcgcacagaacaaaagaataaaaaacgccacccgtaccagccgtggagaccagtttgctgaaggctgggtactggccgttatcagtgaaatacagtcctttgccctgaccgatgatgagcgtgaactgatgcaacagtggctggaacataaatacccgcaaacgcaaaccaccagggcgcgtaaaccgggaagaagccgcaatggcgacgcctcgcgctatgcggggtttcgtgaagggcagaacgtcagactgcaccgcccggtcagtgggcaggaacaacagaaactggaggccagatgattacgctatcaggtaacagccggaaattaaaagcctgccgaatatctgccagatacctttttgcccgcgccttttttaagaacgtcaggccggggatcacaattggtgttattgccggacgcgaacaggttgaaaaatacatgtcaggtgcatggtggaataacgaccctgtcattgctgcccgtaatattcatatcgaatggggaggtattcagaatgactactgaaaccattgtctgttttcttttctggtatatgtacgcaggatcatgcagcgcaagacttcatcgttccctgggctatggcaggcactacgacaccgcgcattacatcctgtacatgaccgccgtcatgttgttctggccagtcaccctgccagctgcaaccgacattgttgccgacagactgaaaaaaaggagatgatatgcagaaaaaacgcctgatacagcttatccatattgcccgtaatgaactgggtatggatgaagacacctaccgccagatgttacaggggctgaccggtaaagcctcaaccaaaggaatggataccacacaactaaactgcgtgctggaatccatgaaaaagaaagactttcgcgttaaaccagccagaaaagccagctccggtttaccgctggataaccatccgcagtccaggaaaattcgtgcgctatggcttgaaatggctgctgccggcattgttcgtgaccgttcagaaaatgcattagcgcggtggatcaagcgggaaacgggcatcagcgccctgcgctggctcaatactgaacaggcaagcagtgttattgagaaactgaagaagtggcagcacagagctgcgggagtaaaacatgagcgacctgaatcagtttcgaagtaaagggccggaactcctggtggagctggcacagcatacctctgagaccgttcgcgagattattgatattgagcccgcaattgccgaccagattggtcaggccgtcgcgaaccgaatgatgcaggtctggggcgggcaaaacgtttatttcccgatgggcatggtatggaaggtcagtcagcgcgaccgggaaatcttcagggagtttaacggacgcaaccaccacgaactggcccgcaagtttggtgtttcgcttcagtgggtctacagcgtggttaagcgggtcagaaaagaagaactggatcggatgcagggcaggttgtttgatgaagatctgccagaggagacgaaagacgttaacaaatccagataattcctgcttgttaaagccctttcaaaaatctccttattgtataaaagcacggtagaccccttaccgtgctttttttatgctctctctttagtattcaggatgcagggagaaaatatgtttgacgtttcgttgttaaatctgccatgggcaacactggtgaccctgaccagtggctatattgggtattttattgcgaatgtgggactgaaggatcaccacaagcccattgaggtgactttttcttcgctgatttttggcctgacagcaatgatggcttaccaggctgttatgtgggcaggtctgaatgcctggctggcaacaccaccagcacttctgtgtgccgttacatgtggtgcgtggtggcgcaggtacggtcgcaaatggatgtacagattactgtggaataatgatgtttcatggtctgacgataccagctcagcatggcaggcaatgtttgatcaaacaggcttcagcgttaccgaggtcagagtgattcttcgcgatggttccggtatgatgtcacggctgccagggaactttgaagagtggcctaacggtccgtttaccctggggaataaaggcgatatggttctttacgtcacgcacagcagcccttcaggcagtaacgaatgggaagagtataaaggcgtggttgataagtactggggagctctggcaacctatattccagcagatcagattgccagagtggagatcaggcgcgttcgtgcaacgaacgatgaatgatgtttattttttccctggggcaggggctgccggcatagtggttttattggcagaggaagacgattctccttttctaccggaatcgcgctcgaacgtcacgatgtgcttgcttttgggcttttctgagtaatccaggctatcatgcttattgttttgagtagtcattggaatcatcctttttgttgcgggtcatgtttcagcaaactcgattctaagttgccaggaaggatgatttcaatgcccgacttatctatcgtatagcggaaaagaatttcagttctgttcaccagaacccatgttaacccactccaattcgttatttatctcacggatcccccttcatttatctcatgtctgatcacatcatggtggaaaccggggacgtcagcttatcaaagacatagtagtcatagccccagccttccagggttttgctttccagttgaccgcccaggcggtgatggttgcagtcgacttccagcgtctggccaatcatcagttcaacttttaacgcggattcatcctgctgctgcggcagctgaatcacctgacgcttcatccctttttccgctttcggatagggggcgactttctccagcggctgttcagcggctaaggcgctggtggaaacacaggcaacggccagcagagaaacagcaagcgtagcgatttttttcacggttgatcatcctttattatcgttactaaccaatacagactaacatcattgtcgtgaatggtaagagttatttaccattattttcaatatgaatagtgaaatgcactagcaagctgaggcttgcgttagctattcatcgcggctgtttttggcttcttcaataaactcttcgtccagtaagtcggcgttcccggcgtgttcacggcccgataacaggttccagcaggcaataaacaaggcggcaatcagcgggccgatgacaaagccgttgatgccatagatttccatgccgccaagggtggcaatcaggatcagataatccggcattttggtatctttccccaccagtagcggacgcagaatgttatccaccaggccgatgacaatcacgaagaaaccgacaataaacgccccttgccacaattgcccggtggcgaacaggtaaatcgccgccggcacccagatgatggcggagcccaccgccgggatgagcgacagaaaggccattaaagcgccccacagaatgctgccatcaagaccgacaatccagaatgcaaagccgccgagcgccccctgcgccagcgcgacggcaacggtacctttaaccgtcgcccgcgcgacggcggcgaatttggcaaacagatgttgttttacgtaattggatagcggcaaggattcaaggatcagaagtaccagataggggccatccttcagcaagaagaacagcaggtataacataatgccgaagctgacggtaaagccaaaggtccctttaccaatcaggaaggcgctaccggccagatactgcccgcctttcagggcggcatcggacagctgctgctgaatctgttccgcgctatcgagattgtgctcggagaggaaacttctggcccagctcgggagatgggcaaacaggttggcgaccaccgtcggaaactgggtgtcgttgtgctgtaacttggtgtagaccacgttgagttcgaaggctagcgacgaaatgataatcgccaacggggtgaaaacaataagacagataatcacgacggtcagtagcgccgcgataccgttgcgctcaccgatgcgcgtacggatgttgttttttaccggattaaatatcaccgccaggatagctgcccacaggatagcggaatagtaaggggagagtacgtcaaaaaaggccagggtaacgatcagtaaaataaggataaaaaatcctttggtaagtcctttaactctcattgggtccgctccagatgataacgaatacagtcgaatgatagatggaatttaacaatttgccatcaggataatcgcagtcacaaagggaaggggagtacaaacattaaaaaacccgcgctctcagggagagtgcgggttctaaaggggaccggtggttgtagcaacctaccggttaaatttttggtcggcacgagaggatttgaacctccgacccccgacaccccatgacggtgcgctaccaggctgcgctacgtgccgacgcgtggaggataatattacccgttcccccatcgaatgcaagcgaccgacaactgattgatttaaaattaatcaatcagttagcgataaagcgtttttcatccgtcagcacctgcagcagcaggctgagctgcggtttttggtctttaatcttctcaccatcgctgttccaggtgtggtaggtgccgttgtggtcgagcaccacggtcatcgttggcgtggtaatcgccagagtatcgctattggccgcagtgacccagctgcggcggcgtgccgggctaaacaggtcttcgccctgcgaatattcattcgctggcgtcgacacgtgcagcagacgctgcatcagcgtggtcatcacgtctttgttatccgtgagcgttgagatctcttgcgctggggttcccggccagtggataaccagcggcacctgcagattgccacgtgaccagtcgaatttaccctgcttgttatccagcggcataccgtgcccggcggtaataatcaccaccgtattatcccgtttgcccgctttacgcagcgcgtccagcacgcggccaatttgtgtatcgacgttgcctgcagcgcggccataggtgcgcgcaaaattctgctgctggctgttatcaatattagtgccgttcagcgatacccacgagaaccagcggttctcgtccagagcgtagcgatccagccagccgatccattggtcggccgtttgttcatcgctctgcgttttagccgccggcagcgagaagtccgacagcagcgcctggcgataaagcgggctgctgaaaccgtctgatgagaacaggcccaactggtaaccctgttggttgagggcggtaatcagcgccgccggaatacgcgccgagagcacgccatccatataacccggcgatatgccgtagaacaggccgaacatcccgctgtcggtgctattaccggagctcatatgctggctaaagttgacgctctctttcgcaaaagccgccagctgcggcatgttcttctcgaaacgtgaatagttaaggttatccacggtaatgagcagtacgttgtaacccgtaccgaggtcgcgatagcgcagatcgctcagcggatattgcaccgaaaccgcttccggcgcgccttgctcaaccagacggcgctgatagtcttgcgcatcgagcaggccatgcttctcaaggaagcggcgggcggtcatcggataagagagcggcaagttggcccgctgcatggtaatcgggcgataaaaattggcatccgcccagatataaatcaggtggctgctgataaacgaaataaagaaaaaccaggcgacggggcgcgcgtagtggcggcggcgcgtcaggctgcgcagcttttgccagctccaggtggcgaagagcatctcaatcaggaagatgatcggtacgctgataaacatcagctgccagtcgcgagccatctcgttctgatcggggttaatcaccagttcccagacgacgggatttaagtgcaggtggaagcgagtgaagacttcgctatcgattagcagcagcgtcatccccgcggtggcgaagataaccgacaggaagcgcataagccgctgcgagccgacaataaaggtcagcggaaagagaatcagtacatagctggtgaaaaccagaaaactgaaatgaccaacgaggctgacatacgagaatactcgtccggcaagcgtcgttggccagtcggcgacaaaaagatagcggctgccgagcgccatagccaacaatatgttgaacagggcgaaccagtgtccccagctgaccatctgggagactttttctcggtagggctgacgaagagtcaccatatactgttgttcgttatccttagtgcgcgggatcgtcgttaatggacgattgcagcgcctgggcgaaagaacgggcgattgcctgacgctgagccggcgcgacgctactgttgagcaggttggtcaccatattgcccagcaccatcagtgacaggtcaaccggcgctttgtgtgtttccaggacgttcgttagctcgctgagcagctgctcgacctgttcatcgctatagcgggatatttgtggcataaactcaaaatctgtttgttcgtgaaagggcaacatattaccgtagcagcagctttttttccgcattttttcgccacggcgcaaaagcgcccggccacgcgagtctcaagcataaaagaggcgtctgccggttgcgtcgtcgtcccggtggtggttgaataccgcccggtctaaaaggagagtttaacatgagtctggatatcgaccagattgccctgcatcagttgatcaaacgtgatgaacagaatctggaactggtgctacgcgagtcgctgctggaaccaaatgctactgtcgtggagatgatggccgaactgcatcgtgtctacagcgcaaaaagcaaagcctatggcctctttaatgaagagagcgagctggcgcaagcgttgcgtttacagcgtcagggtgaagaagaatttcttcctttcagccgtgcggccaccggccgcctgcgcgatgagctggcgaagtatccgtttgccgaaggcggcattgtgctgttctgtcagtatcgttacctggcggtcgagtatctgctggtggcggtgctcaataatctgagcagcatgcgcgttaacgaagagctggatatcagttccacccattacctggacatcaaccatgccgacatcgtggcgcgtatcgatctgaccgagtgggaaaccaatcccgaatcgacccgttatctgaccttcctgaaagggcgggtggggcgtaaagtcgccgatttcttcatggacttcctcggcgccagcgaagggctcaatgccaaagcgcagaaccgcggtctgttgcaggcggtggatgatttcgccgctgacgcgcagctggataaatccgagcgccagaacgtgcgccagcaggtgtacgcctactgtaacgaacagctgcaggcgggcgaagagatcgagctggagtcgttgtcgaaagagctctccggcgtcagcgaaaagagtttccaggagtttaccgccgagcagggttatgagctcgaagagagtttcccggcggatcgcagtacgctgcgccagctgaccaaatttgccggtagcggcggcggcttgaccattaactttgatgcgatgctgctcggcgagcgcgtattctgggatccggcaacggatacgttgaccattaaaggtacgccgccgaacctgcgcgatcagctgcagcgccgtacctcaggcggtaattaatccctgctgattatcccggcggaacatgatgccgccgggttaacctgctacctgaataatcccgacgccgctttgcttaagcttctggagtaacctgtcatccagttcgctatcgataaccactgtgctggcaagattaagctcgccgatggcaaacgcggaggcggaattaattttttcggcagaggccatcaccacggtttctgcggctctggccgccagcgcgcgcttaatgcccgcctcttcataatcaccggtggtaaagcccgcctgcgggtgcacgccggtaacccccataaagaacagatcggcatgaatccgcgccatcgccgccagcgtcccggcgccgaccgtaactacggaatgtttaaacaatgtaccgccgagcaggatcacttcgatccgcggatgctcgaccagcgccacggcgatccccggactgtgcgtcaccacggtgcaagcaaggtcggcaggtagcgcggcgatcatcgccgtggtggtggtgccgccgtcgacgatgactacctgtcctggctggataagcgccgcagcccggcgggctatcgcctgtttggaagccatctgcacgctttttctgctttcgattggcgcgatagcggcggataccggtagcgcgccgccgtggacccgttgcagtttaccttccgccgccagttcgcgcagatcgcgacgaatggagtcttctgagacctgaaagcgctggcttaactcccccgacatcacctgtttttctgcggcaaggatctgcaggatgtgctgttttctctggctggcgagcattttgtttacttcacgattgatcttgtttgtgcatgattatgcatgctatgttgcccgctgtcaccttggaaggggaaaaatcatgcatgaagacgcaccgcgcgttcgccacgttcgcgaaacgctcttgtccgataactggtacacgctgaaaaaatatacctttgagctgttgcgccgggatgggcgctggcaggagcagagccgggaagcctacgaccgcggcaacggcgcggttattctgctctataaccgccacaagcagagcgtggtgctcatccgccagtttcgttttccggtgtggatcaacggtcacgacggctttctgatcgaagccgccgcgggattactggataacgcctcgccggaagagcgcattatcgccgaagcggaagaggagaccggatttcgcgttacccgcattgagccggtattcaccgcgtttatgagcccggggtcggttaccgagaagctgtacttctttattgccgaatactccgcggacgatcgccgtggcgatggcggcgggctggcggcggaaggagaggatattgaagtgctggagtggccgctggcgcgggcgttacaggccattcgcgagggtgaaatcgtggatgcgaaaaccattatgctgctgcagcacctggcgttaaatgccgatacgctccttgccggttaagcggcaaggagcaggggagattagcgcaattcgcgggcaatggcgctgtacatcagcgccgcttccagcggctgtgcgttaaaggacggttccgcttgtggccaggttgaccactgcacgatcaccagatgttccgcacggttgaccataatcacctggccgtagatccccagcgcccacagcgagcctttcagcccttcctgcggcgtcggctgtacgttttgcgcattggccggaatggcgttattccaccattgatagccatagataccttccggatgcgcggctgaaaccgagttcagcgcttttgtccagcttgcggcttgatcgaaccagccagcgggcaccagctgtttaccgttgcccaggcggccatcgcgggcgacaaactcgccaaagcgtccccagtcttcgagggtggcgttaaagccgtgagcgccgacatcatgttgtccttttttgtaggcgtgccagacgccatcgtgggccatacccgcaggttgccacagtgattgctcaagccaggcggccagcgacataccggtcgcgcgttccagcacatcgcccagcagccaggcgccgccggaagagtaggaccactgctcgcctgccggatatttgcgcgacagcgtcgacacaattttacgcacgcaatcataggcgccgggctgagcttcacactgggtcaggcgggcgaagtgcgactgtgggttggtgtaatcttcattccattctacgccgctggtatgttgaatgagctgtttgagcgttacgccgtcccaggcggtgcctttcagttcgggttcataaacggtaatcaggtcgtcgagggagtggattttaccctgttgaatagcgatgccgaccagcgtcgagacgaccgatttgcccaccgagcgcgaggtccacaacgtggtgtcggtattaccttcggcgagatatttccaggcgactttaccgtctttcagcaccagcataccgctgacgttttcgcgcttcaggtaatcctgcaaattccaggtgtggccgttgagcgtatagcgggcatcggtcagttgcttttcagcgcgctccagcgggaccgaggcgccgtggcggaatacatcgccagcatagttgcgatagtcattacgaaagccaatcacgcgtgaagtctgatcccaggtgagcatgtctttggccgcgggtagcgtttgatcgtaaggcgtggggcagacatccagcgtcaggccgccgcagttttgcgccattgccgccgccggcagcgccgccaaaattaacgccagggccagtggttttcttatcattttcatttcctcgtttgccatagattcgcatcgcagtatataaatcggcgcgcggcggctaaaatcactacatgggggattttcccccgaaagggagggaaggatgaaaaccctgcagtattcatttgcacagattgaagccttcgcgacgattgctgagaccggtagtctgtcgcgggcggcgatccgtttagggaaagaccgtacgacgcttcgcgatctgctggattacctggaagatgcgttgggctaccggctattcaggcgtgcagggcgtagcctgaccttaaccgccgagggcgagcagctttttcgccaggcgcacctgttgttgcgtcaggcgcaggctttcgagtcttttgcgcaaacgctgccgcaaacggcctggcaggaattacgcctggtgtacgatcccttcgtgccgcgtgaatttctctgtttgctggccgatacgcttgcccggcggcagatccgtttaagctgctggagcgcttcgcgtcgcgaagccgagcaggcgttgagcgatggcgtcgcggatatggccatttgccaggcgaacaatcgtacgctgggtagcgaaatggagtggcgggcgctgggtaccgttgatttacgcttttacgccgcgcagcggttgttcgctgataccgcaaggccgctgacgttgctgaatttatcgctcaccccgcagttagtcatgcaccggcgcagcgacgatcaaatcgcccgccggctgcagatatccggccatacgctgtatatgaatgaaatcactatgttgcgccacgcaatggagcaggggcagggctggggttttttacccgatcatttacggccccacgagtggcagggggttgctgaaattgccaccgaggtcggtaatcaggggcttaacgttaccatggtgatgctgtggttgccgggaatgaataaacaccgcgcgttgggagagattgttgacgacgcgccagggttatggcggcgcagataacaaaacgccccgggtcagaagacaccagggcgtttgccatacaacttgctatcggcgattaagcgcgaacgaagtcgatgtgggtcagtttcggcttgaacgcgtgacgctgaacagcctgaactttaactttttcttctttgccatcgacaaccagggtcagaacttcgccgtagaactcagctttgtcctgcatgttccacagtttgtcgtggtccagttcgatagcaaccggagcagcttcgccaccgtagatgattgccgggaacttgttagctgcgcgcaggcggcggctcgcacccttaccctgctctttacgtacttctgcgttgatagtaaacattgatgtctctctatatataaagcctgcaacaggcgacccagcagcaggcagattatctgctttgcgaatgcaaaagcgggcggcattatagccgcctatcggcacagcggcaatcaaaacctcagtttttgacggattaacgtagctcattggcgcgacggaaacggccctgataatcgaacactttttcccgcacctgccagtatttccccttcatacgggcgacgacaaagtccggatggcgcagtagcgcctgctgggcaatgatatccgccggggttatccagcgcagcggcacgcccggcgtacgggtatgcgggcggataaacaactgctcaaaggcggtacgctgcgcgggcgtttgcaaacggaagcgctcactcacatcggcgccgtcctcatcgtaataggtgatttttagccacgggcctttttcgtcgccgccatgctgcagcgccatgccgctgcagcgcaataccagcgcgtctttaagcttcagcgccgccttcagcatgtcgtccgggtcgaccagcaccgtatcgcactcgcgacagcggcgggcggcaatgtcattctcggcgttgcactgcgggcagtttttaaaacgaaagcggaagtcgcactgttcgcggtggccgtcgtcgtcttcgaaccagccctggcagcggcggccaaaatgctcaatcagcgtgccgtcggcggtggttttcccccaaaaagtattggcgaaaccgcaggccgggcagaagacctgcaccgggacattatcgcttttgccttttggcgtgccgacttccggcgcatacaggtcgtgagggttgccggcatagtcgaggatcagacagtcggttttgcccggcgccagacgcaggccgcggccaacaatttgttggtaaaggcttaccgactcggttggccgaagaatcgcgataagatcgacgtgcggcgcgtcaaagccggtggtcagtaccgcgacgttcaccagatagcgatactgctgcgccttaaaggcttcgatgatgcgatcgcgctccggccccggcgtttcgccggtaatcagcgccgcctgcgcgggcggcagcaggccggtaatttcccgcgcgtgttcgacggtcgcggcgaagatcatcacgcctttacggttttcggcaaactcaacgatttggctaacgatatgcggcgtgatgcgctgctgttttttcagctcgtggttaaggtcagcttcgctgaacaggccattgctctgcgcctgcaggcggctgaaatcgtactgtaccaccggcatatcgaggcgctcaggcggcgtcaggtagccgtgcttaatcatataacgcagcggcagttcatagatgcagtcgcggaacagcgctttctcgtcgccgcgtaccataccgtgatagtggaactgatagatccaacccttgcccaggcggaaaggggtggcggtcaggccaagcagcctgagatgcggattcacctgccgcaggtggctgatgatttgctgatactggctgtcgtcatcgtcgctgatacggtggcactcatcgacgatcagtaaggagaattcgctttgaaactgctcaagattacgcgccaccgactgcacgctgccgaagaccaccttgccctggctctccttacgctgcagaccggcggcgaaaatatccgcttccagcccaagcgcacagtatttactgtgattctgcgccaccagttctttaacgtgggccagaaccagtacgcgtccgcgcgccaaccgcgccagttcggcgatcaccaggcttttgccggcgccggtcggcagtacgatggcggcgggctcatggtgacggcggaaccaggccagcgtggcgtcaacggcctctttttggtagggacgtagtgtaaaagtcatcaattctcgggggttaattaactcgcaaatagtatgccatgaatcttttcccttgagtggtgttaagagcccgttatactaaccaatggaattcttctttttcgggcgagatgcccgctccagcattattacaggctaaaaaatctcatgcgacttgataagtttatcgctcagcagcttggcgtcagccgtgctattgccgggcgtgaaatccgcggcagccgcgttaccgtggacggcgacattgtgaaagatgcctcctttaagctccagccagagcacgaggtggaatatgacggcaatacgctgacccagcagcacggcccccgttactttatgctcaacaagccgcagggttatgtctgttcaacagacgatcccgatcatccaacggtgctttattttctcgatgagccggttgcccataagctgcacgccgccgggcgtctggatatcgacaccaccggtctggtactgatgaccgatgacggtcagtggtcgcaccgcatcacttcgccgcgtcatcactgcgaaaaaacctatctggtggagctggaaaatccgctagaagagggcgtcgccgagcagtttgccaaaggcgtacagctgcataatgaaaaagatctcaccaaacctgcagtcctcgaagttatcactccgacagaagtgcgcctgaccatcagcgaaggccgctaccaccaggtaaaacgcatgttcgcggcggtgggtaaccacgtcgtgggattacatcgcgagcgtatcggcgacattaccctcgatgcgtcgctggagcccggcgaataccgcccgctgacggaagatgaaatcgccagcgttggcgccccacaagcacggagtaaaacgtgacgacaaagcagaattcttcatttgggattgtgtttattcttggcctgttggccatgttaatgccgctgtcgattgatatgtatctgccggcgctgccggtcatctcgtcgcagttcaacgtgccggacggcagcgcgcaaatgacgctcagtacctatattctgggctttgcgctggggcagttgctgtacgggccgatggccgacagcattggccgtaaaccggtgatccttggtgggacgctgatattcgccgcggcggcggtggcctgcgcgttgtcgcagaccatcgagatgctgattactatgcgtttcttccacggcctggcggccgcggcggccagcgtggtgatcaacgccctgatgcgcgatatctacccgaaagaggagttctcgcgcatgatgtcgtttgtcatgctggtcaccaccattgcgccgctggtggcgccgatggtcggcggcgcggtgctggtatggttcagctggcacgcgattttctggatcctggcgctggcggcgctgctggcatcggcgatgatcgctttctttattagcgagacgctgccggtagaacggcggcagaaatttcatattcgcaccacgcttggcaacttcgccaccctgttccgccacaagcgggtacttagctatatgttggccagcggcttcagttttgccggcatgttttcatttctcagcgcgggtccatttgtctacatcaacattaatcacgtgtcgccgcagcactttggctactattttgcgctgaatatcgtgttcctgttcatcatgaccatcattaacagccgctttgttcgccgggtcggcgcattgaacatgttcagagccgggctgtggatccagctggcgatggcggtgtggatggtggtgtgtgcgctgcttgatgttggtttctggtcgctggtggtgggcgtggcggcgttcgtcggctgcgtatcgatggtctcctctaacgccatggcggtgatcctcgacgagtttccgcatatggcgggaaccgcatcgtcgctggccggaacatttcgctttgggattggcgcgattatcggcgcattgctgtcgatggccacctttaccaccgcctggccgatgctgatttctatcgcattttgcgccgttagctccattctcttctatctgtacgccagccggcgacgaaaagtcgcacattaagtcacattttcaggggcgatttccgccccttttttgatacatgtcaaccgaaatcggcttccctgtttagctatatgtttcttttatgtaaaatcaattagtgtaaaaagtcgcaatgttgcgataaaaaagttgttttggatcacagaaacgggtacatatagccgcgaactgtttccgcaaggcaactataaagttctggataataagctgttagccctgaccttatgcgggtgtaagcgttttctaagctgttgcaggactatttgtcaacaatgtgttaatattgatgtaaatttattgtgaagccttttgcttccggggaaaccaagtgaatacacagcaactctctatcgtacaccgactgccgcagagctatcgctggctggccggttttgcgggttcaagagttgaaccgattccgcaaaacggcgctgagggcgaaaatagccttgtggcattaaaactgctcagcccggacggcgagaaagcgtggccggtgatgcgcacgctgagccaggcgctgagcgacatcgaagtggactgttccattcttgagtgtgaaggcgaaccgtgcctgttcgttaatatgcaggatgagtttgccgctacctgtcgtctgaaaaatttcggcgtggccattgccgagcctttctctggcaacaaccccttctgaccgtcagcttaacgccagcagctggcgggtgtactcctgaagcggtgccgtaaatacgcgctcgcattcaccctgctcgacgacttctccctgccgcagcactatcacctgatgacagagcgtccgtacaacacgtaaatcgtggctgataaacagataggccagctgatgcttttgctgtagcgtcttcagtagcgccaggatctgcgcctgcacggttttatccagcgatgaggtaggttcatccaacacaatcagctgcggtttgacgatcagcgcccgggcaatggcaatacgctggcgctggccgccggagaattccgccggatagcgctgccgcgtcgcgggatcgagccccacttcctgcatcacctgaatcaccgcttgttcacgttgcgcggacgtcaacgtcggctggtgaacgcgtaatccttcctcgataatctgcaggacgctcaggcgcgggttaagggatgaattcggatcctgaaagaccacctgaatgcgtcggcgcagcggcagcatctggcggcgatttcgtccctggatcgactcgccggcaaactgcatttctccgctggagttaatcagccgcagcagcgccagcccggtggtgcttttgccagagccggattctcccaccagccccagcgtttctccggcccgcagggtaaaagtcagatggttgaccactcgattgtgatcgaccacccggcgcaggatccctttgcggattgggaaggcgacattaagatcgcgggcctgcagtaggatgggcgcgtcggcggggagcggcaccggtttgccggccggttcgctatccagcaggcggcgggtatacgggtgcgttggcgcctgaaacagctcccggcagccgttttgttcgacgcagcggccgttttgcatcaccgccacccggtcggcaagctggcggacgatgctcagattgtgggtgatgaacaacatccccatgttgagctcacgcttcagttcgcgcagcagttgcagaatctgcgcctgtaccgagacgtccagcgcggtggtcggttcatcggcaatgagcagctccgggcgcgtcagcagcgccatggcgatcatcacccgttggcgttcgccgccggaaagctggtgcggatagtcggcaagccgtcgtgaggcgttgcggatgccaacccgatccagacagtcgaggatttcgccgcgcgccgcctctttgcgcatgccgcggtgcagcgaaagcacctcgtacagttgtttctccagattatgcagcggattgagcgacaccatcggctcctggaaaatcatcgcgatgcggttgccgcggatcccgcgcagggttcgttcatcggcgtgcagcaatgattgaccgtgaaagcgaatatcgccgctgggatagctgaccggcggcgagggcaggaggcgcagtaccgacagcgcggagacgctcttgccggagcctgattcgccgaccaacgccagcgtttcacctgcggcaatccgcagcgtcaggttgctgacgaccgtttggcttgccccttgctggcggaaggcgatagagaggtcgtcaatgtctaataacggctggcccatgttataccgccttacccggatcgaaggcgtcgcggaccgcttcgccaatgaaaattagcagcgtcagcagcaccgccactgacaaaaatgccgccatccccagccacggcgcctgcaggttatttttcccctgcagtagcagttcgcccagcgatggcgagcctagcggcaggccaaagccgagaaagtcgagcgaggtcagggtggttatcgaactgcacaaaataaacggcaggaaggtgagggtagcgaccatcgcattcggcagcatatggcgcaggattatatggcgatcgctgacccccagcgcctgtgcggcgcgaatataatcgtagttacgggtgcgcaggaactcggcgcgaaccaccccgaccagcgtcatccagccaaataaaacggtaatcgccagcagccaccagaagtcaggttgcaccacgcttgagagcagaataattaaaaatagcgtcggcatgccggaccatacttcaataaaacgctgcccccacaggtcgagcttaccgccgtagtagccctgcagcgccccggcaagcacgccaagcacgctggagaagaacgtcagcagtaggccgaataataatgagatccgtgcgccatagaggatccgtgcgaatacatcgccgccgttagcgtcggtacccagccagttgtgccgggacggcggcgaagggaaggggctgtcggtggcgaaattgatgctggtggcgccgaaacgcaccggggcccacagcacccagccgttttccgtcagccgtttttgcagccaaggatcctgatagtcggcggcggtggcaaaatcaccgccaaaggttgtttcgctataggttttcagcgccggtacgtagagactaccgcgatactgcaccagcagtggtttatcgttggcgataagctcggcgcacaggctgcaaataaatagcgcaaggaagatccacagcgaccagtagccgcggcggttgtggcgaaaacgcgcccagcgggcctgattaacgggggagagaaatgacattagcggccctcgaaatcgatacgcggatcgaccagcgtatagctgatgtcgctgacaatgtttaataacaggccgattaacgtgaagatatacagagtgccgaacatcaccggataatcgcgcgacacggtggcttcgtagccgagcagcccaagaccattgagcgagaacatcacctcaatcagcagcgagccggtaaagaacatgctgataaaggtggcgggaaaaccggcaatcaccagcagcatggcgttgcggaaaacgtgtttccacaagatctgtttttcaccgacgcctttagcgcgggccgttaccacatattgcttgcggatctcatcaaggaaactgtttttagtcagcatggtcagggcggcgaaaccgccgatcaccgtcgccagcacaggtagggtgatatgccagagatagtcggcgatcttctgataccacggcaggctatcaaaattagcggagaccaggccgcgcagcggaaaaagatcgaaatagctgccgccggcgaaaatcacgatcagtaatatcgcgaacagaaatgccgggatggcgtaaccgatgatgagaaatgtgctgctccagacgtcgaaatggctgccgttactgacggctttacggatccccagcggtatcgacaccaggtagataatcagcgtgctccacaggccgagggtaatagataccggcaggctgtctttaatcaactgcagcaccgaagcgctgcgaaacaggctatcgccaaaatcaaaacgcagatagtcgccgagcatcttaaagtagcgttcgtgaatgggtttatcgaagccgtagcggtgggtgatttcggcaatcacttccggatcgagcccacgtccgccgcgataatggccttcactgatattgccaacgccggtacgcgcatggctggcgcccataccgctatctcctgcgccgggcaacgcgccgcggtcgccgaactccacggcggcgatcgcctgatcgaccggaccgcctggcgcaatctgcacgataaaaaaattgatggtgatgatggcccagagcgtcgggatcaccagtaatagtcggcggagcaggtaggcgcccatctttaatccttaacgtcggtccgcgggaagcctggcggctttgttaacatcgtaccaccagccatcaaaaccggaggagtaggtcgggcgtgtttgcgggaaggaaaatttattccagtaagccgtccggtcctgcgccatataccacatcggcagcatgtaatagttccaggtcagcacccggtcgagcgcgcggcccagcggcagaagcttctgtttgttgccctgccagcgcacgatctgcgcaatcaacgcgtcgaccgccgggttctgcactcccggcgcgttatagctggagttaatatagtccgaggcccacgaaacctgtaagcccgtatctggccaggcggtggcgcgccacagtgagggcatcatgtcgtaatcgcggctccgcagtcggctgttggcctgggagttatccacctgacggatatccatcgtcacgcctaaacgctgtaaattatgctggaacggtagaacccaactgacgttgccgccggaggcgagcagcagctcaaagcgcagcggtttgccggttttggcattaacgcgctgacggttttttagcacccatcccgcctggttcaatagggcatctgctttgagtaaattggcgcggtcaaaaccatcgccactggaaactggcggctgataaatccgggtaaagacctcaggcggcaattcttttttcatcggcgccagcagggcgagctcatcggccttcgggtaatcacgagcggcatattctgtgttctgaaagtagctgtttggccgactgtaggcgccgtaaaacagcgccttattcatccattcgaaatcaaatgcaagggtgatggcctcacgtacctgacggtcggcaaagaccggtcgctgaatattaaaagccagccagcgggtatccgttgccgaggtattcgttcgatcgtctttcacaatataaccgttgctaaagttgcgcccgatatagcgcgtggcccagttttttgttgaactctcctcgcgcatatctaccgctccggccttgaaggcttcgaaagcgacgttatcgtcaagatagtagtcgtagcgaatcgtgtcgaagttccagcgcccgcggtttaccggcaggtcggcggcccagtagttctcgactcgcgaatagacaatatactgccccatccgccagcggctgatacgataggggccactggcgagcggcggcgttgaaagcgggtcactcaatttatgatggcgccagaatgactcaggcattaccggcagcgacagcaggctgagcatattttctttgcccggcttggccagttcgatgcgcaccgtcagcggggcgatggctttgacggtcgtccctttatagataagacggaactgcggtaccccttcggtcataaatttgtggaaggtgaaagcaacgtcgctggcggtaatcgggctaccgtcatgaaagcgggcacgcgggttgatggtaatatccatccacgagaaatcatcggcaaagcgcgcgcgatcggctatcagcgggtagtagctgcccggttcatcgtccgaggtggtaaacagggtgtcatacagcgcatcggtgcgtacgccggggttaccgcgcagggcgtagcggttaaaattgtcaaaggtgccaatggcggcaagcgttatactgccgcctttaggtgcgtccggattgacgtaatcgaagtgatgaaagtcaacggcatactttggctcgccgataatagcgaacgcttcgctctctttaatggtttgcgcctggctactcaggctaaataaagccagcagcagcaggccgatgcgcgcaaacatagttggaatatcatcctctgaccattaaccccggtggtttcgcatcataagcgaccctcagcggcttgtgaaataatttgccggttcatcatgggcggcgaccagtttatccagcggcagcgggcggctgaagcagtaaccttgcagatacttcacgccgtgagcgcgcagccattccgcctgttcaggcgtttctacaccttcagccacggttttcagctgcagacggcggcttagcgttaacaccgcatccagcacgggagaggtgacggtttcggtaccgatcgcctgcacaaaaccacgatcgatcttcagataatcaaagttatagcgctccagataaatcagcgcgctatggccggtaccaaaatcatcgatagcaatttcgaagccctgctgatggagccactcaaaaatggccatcgactggtttttatcgatcatcgaacgttcggttatctccagcacgacgtcgaagtagtttgcgggtaacgcggcggcaaaacgttgcatatcttgctggaatccggcggcatgcaggtgggcaggcgagatattcagaccgagcttggtaccgcgcggcaaaatacgctgcagagtcggcgcgtcgcgggcaatcaacattaacaggtgatgggtaagcggcacgatcatctgctgcgtctccgccagattaataaagacgtctggcgggatttcacctaccaccggatgccgccagcgcatcagcacttcaacgccgctaatctgcagggtatcggcctttaccaccggctggtagaccacgtagaactggttgtttttgatccccagttggatcgatttccgcggatcggatttgatcgtcaggatgtagtagctgagtaagccggcaagcatgccgcataccacgccaagtagcagggcgaactgagtattctcgccaagccaactgttggaaaagagatacacttttagcggtagccccggaacctgaatctgacgtatcggctcattgggcaatgatagcgggtcgataattttactgctgaaggtcgaaattgccgtatggccgatggccagcgcaatgccgctgaagtcattctgtcgtgcggtatagaggatataaggcgtgagattggcattgatggatacaaaaatgccgctgtctcgatcgccaggacgttgtacccacattgccagcgcggcggtgttcggcatcatcggcgtgccctggaggatggccatatccagaggtttattggtatcaagctgcggtatcaattgtttaaacggtgtgtccattgcgccggtggcggatgagcagaacgctttgccgtttttcaccagcaggaaggcgcgcacgttgggactaaaggcggcgctggcggcgaggccggagtcaatatgttcgcagggctgatcgagcagcggctgcaggccatcaatggttttgcttaaatcagcgaaatagctattaaggtagtggctgacgttattgattatctgatcgaaacgctcagagcggttgtggtagataaccataaactggatgctgccggccagtagtgcgacggcaacgccgatacaaatactggtaagccagattttacgtcggggtgaaaagtagcgggttagcataggccagaatctgtccgtattattgaatcacgccaatgggatgcctgaagagtatggttccatttcctttaaaagacatagcttataaagacatagcctattttgcggggttcaccggcggagaagcaaaaaaaaaacactgccggggcagtgttcttttcatttcttaccgtcagccaagggataactcacggtaagaagaagaatcaggaacgactcagaacgcgacgcgcttcgttatagcgctttttccagtatggctcatccaggcttgagatggtgacgccgctgctggtagaggcatgaacaaactggttgttgccgatatagataccaacatgacgacccgtagagccagcgcggaacagcactaaatcgccggtacgcagttgagtgcgcgaaatcgatttgccggaatcctgttgctcggaagttgagcgtggcagctccaggccaaattgttcacggaaagtacgctgcacgaatgccgagcaatcgatccctttccgggtgctgccgccaaggcggtaacgcacgcctttccagctagcatactggtccatcaaacgggacttcacgtccaggttgctgaccattttttcaaattcatcctgagaagcttgcagtgatgataaatctccactacccacagcatgcgtctcagaatgcatattcttggcggtacttgttgaactacacgcggaaagcagaaccgcaactgcaatcgcgggggcgacccgcaagatatatctcaaaatcggctgagatttgaccattatgtttattttcccttgttgtccttaacgacaatgtcgttataaaaaatgccaaacgtggtagagcctagattccagaaagcaatgagacaattccttaagcctaaaaatgtggagtaccgcacaaatttatttggatgatgaattgtgttgcttgggaaggcaaaacgagaaagagattaccctatcaaacgtgggatggcgagcggttttgcgcgatttcttataagtatttttgcgaccaaaagtgaatcatcggcaaaggggaaaatagcgccttttttggctgaaaaatatgcaatatcttcatttcaatgatgattaatgtgacaggaagatgatgtcgcgaataaatcatcagcaaatataaaaaaaggggtcagaacgaccccttatggataatattaataaaatgtaaaaatgatcttatttttttgctattccacccggaagcgaacggtcgaaccaggcgatggccttatcggaaagcgaggtcattaatacccatggcgcgccaatcagcaccgcgctgagtgaacctacggcaatatcggtgaaccaatgggcgccgatcatcactcgcgggaaagcaaaaaccacaaaaataatcagtgaaatggtaaatgcccggcggccgaaatatcgccacataaacgaggcgaaaatgagcaacatcatgccgtggtcgcccgggaagctatcttttgaagcgtctttggtgggcaatgagaccacgtcgctgactttcgtgatatccgtaaagaacagcgaagggctggcgcgttttaccggcatcagatgctgggcaagttgattgataattaccgctgcgagcaacatcaccagccccataatgattatgcggcggcgctcagcgctttgttctttgatccagaaactgagcatcaggcagcccatcgccagcagcgagcaggcgtcgaaagcgcgattgttgatgatggctaacagccaggcataggtgtggttggcgctgacgccctggttaaagaagtgaaaaatagccgagtcaagcgggaaccagaaaccgtgatttgccggtagataccaggaacaaaataaggctacgcccgcgacgttcagcagcaagataagtggaatacggtttttagtcataacagatgcgatttttttaaacagcggccaaacatagccgcattaacttaaacgaagcttcaacagcgaggactgcagggcattccagtcaacgtctgattcacaaatcagttcgatgcggctatccggcggcggcgcgttttgggtttcgatatgcagatcgagtccctggcggttgatacgcaccagaccctcggcaattcgcatcacgcctttcacccggccaaccggcgccagacgcgcccactccagcaacccaacggtgtcaaattgggtatcagcatcaaaaatccatccgcaggcatggtatccctgaccactgttaacactgcgacgccagcgttgatgcgccggtagattcaacgccgccagaccctgcttttgcccgtgactatgcacgtggtccgggcttgccggcagcggggcggtgttacggcgcgggagatccagcagcgcgagctcgatgttaccctgggtggcgttcacctgcaggcgctcgcccccgtactgttgccaccagttggcaaaagcggcctcgctttccggcgtcgcccgatcgcttttattggcgacgatgatatcggctgcggccagctgatcgcggaaattatcattggccacgatcttttcctccaacagctggcgcggatcgagaatgcacagcgtcgcgcgcagatcgatccacggctcgtagaccgcagcggtgaggatatcaaggatctgcctgggatgacccagtccggttggttcaatcagcagacgatcgggctttccctggcgcagcagcgtattgagcccaacctgcattggcagaccgttgacgcagcacatgcagccgccggagatctcttttagtaacgcgccgctttccgccagcagggcgccgtcgatgccgacttcgccgaactcgttgaccagcacggcccatttttcatttgcaggcttgtgggccagtaaatgaagaatcgaggtcgttttgccgctgccgagaaagcccgtgatcaggttagttttggtcacatcccctccagcatagaaatgtaatgttgtaacagttgcgactatcctgacgaaaaaaggggaaaaagagaaggattactgcggacagaaaaacattctgtccgctaaacagcagaaattgttaattatgcagtgcggtagctacggcttcgcgggcgcctgatttagctaactgatgccaggctgaagtgatttcggcaacaaattgtgggttgcccggcagatctttgccaaatatctcttccaggccaatcagggcgctgacgcgttcctcttgctggctggcgtcaaccaaccgtttgattttgtcgactagcgggtcgcgcacgtcaatggcttgcccggcgtcgtcgacgccgcttacgtaacgcatccagccagctacacccaacgccagcagtggccagcggctgccgttagccagatgaacgcgtatactatcgagcatgcgctgcggcagcttttgactgccgtccatggcgatttgccaggttcgatgctttaaggccggattggcgaagcgcgttatcaggctgtcggcataggcaactaaatccacgccggtaatcgatagcgttggcgcttgttcatcaagcatcaggcgacgggcggcatggcggaaaacatcgtcctgcatgcagtcgctaacgtgcgcatgccccgccaggtagcccagccaggcgaggaaggagtggctaccgttgagcatgcgcagtttcatttgttcccacggcaggacatcgttggtcatctgtacgcccgcggtttcccaggctggacgcccggcgacaaaattgtcttccacaacccattgaataaacggttcgcagctgatagcgcagggatcgtcaacgcccagcacggaggcaatctccgccaaagattcttcggtggcggccgggacgatgcggtcaaccatggtgccggggaagctgacatgttcagcaatccagcttgccaactcctggcttcgtttctcagccatgccgaggacggcgtttttcacgacgtgaccattgtcgggaatattgtcgcaggagagtatggtaaagggagcgagtccgcgttcgcggcggcgattgagcgcttcaactaaaataccgggagccgactgcggcagcgtcgggttttccagatcgtgaacgatgcgcggctgggctggatccagtttaccggtggccggatcgatgcaataacctttctcagtaatcgtcagcgaaacgatagccacctgcggttcgcaaaatttttcgataattgctgccagcgaatcaagtttggcgttcaggcattcatgtactgcgccaaccacgatcggctggttaccctcagcgcctttttccagcaccgtaaacaggtggtcttgcgcacgcagttggctcatcagcttatcgccgctgaacaggctgatttcacaaattccccagtcgccgccgctggcgttaagcacccggtcggttagcagcgcctgatgcgcacggtgaaatgcgccaaaaccaaggtgcacgatacgcgagcgcaattggcggcgatcgtattgcggaagttgcacgcctgctggcagcgcggcggtagcgatagttgtcatttttatacacctgattaaccaatgattaacatgaggtagtgtaaagttatatgacaacaatttgaattggtaagccgaatttatccgcttagtgtgagctggatcaatcaatgctacgggggaaattgaccattaagcagaagcatgtatggtagtcgtcatgatgtttcacattattggtataacaacttaaagagggcattgcgatggagcaaacctggcgttggtatggaccgaacgatccggtatcgcttgatgatgtgcgccaggcgggcgccacgggtgtcgtgaccgcgttgcatcatattccgaatgggcaggtctggccggtagaagagatccaacagcgtttagcgctactggcggaaaaaggcctgagctggtcggttgttgagagtatcccggtgcacgaggatatcaaaactcacagcgggcaatatgagaagtggattgccaactatcagcagagcatccgcaatctggcggcctgcggtattgataccgtgtgctataacttcatgccgattctggactggacgcgtaccgatctggaatatcagttggctgatggctccaaagcgctgcgttttgaccagattgctttcgccgcttttgaactgcacatccttaaacgcccgggcgccgaagctgactatagcgctgaagaacagcagcaggcggacgtttactttaaggcgatgagcgcggcggatatcgacaagctgacccgcaatatcatcgctggtctgccgggagcggaagagggctatactctcgatcagttccgcgcacgtctggcggagtatgaccacatcgataaagcgcaattgcgtgagaacatggcttacttcctgcgggcgattgtgccggtgtgcgaagaagtcggcgtgcgcctggcggttcacccggacgatccgccgcgtccgatcctcggcctgccgcgtatcgtgtcgactatcgaagatatgcagtggttgaaagagacggtggacagcatttataacggctttaccatgtgtaccggatcctacggcgtgcgtgccgataacgatctggtgaagatggtggaaaccttcggcgatcgtatccactttacccatttgcgctctacctgccgtgaagagaatcctaaaaccttccacgaggcggcgcacctgaacggcgacgtcaatatggtggcggtggttgatgcgattctgagcgaagagctgcgtcgtaagaaagcaggcgatctgcgtcccatcccgttccgtccggatcatgggcatcaaatgcttgacgatctgcgtaagaaaaccaaccccggttattcggcgattggccgtctgaaaggcatggcggaagtgcgcggcgttgagctggcgctgaagatgaccaaatatcctgagctgctgtaatcgtggcgtgagggaaagcaaaaggacagccagtggctgtccttttttgtgcctgatatcggcagcgagtagcctggataaggtgcgcagcgccgctatccgggaagagtccggcctgcgtgacgctgggccgggcaaccgtcagaggcgggaggttagtccgcgcggcccatatagcggcactcttcgatatgaatgcggattttctcgccgctggtcaggtattccggaacctgaatcaccagcccggtgctcatggtggccggtttggtgcgcgaactggcggaagcgcctttgattcccggcgcggtttctacgatttccaggtcaacggtctgcggcagctccagcgccagcagctggccatcccaggtcaaaacctgcatatccggcatgccgccttccgggataaactgcagctcttcttcgatctgctctttggtgaaggtatacggggtatagtcttctttatccatgaacacgtattcgttgccatcgacgtaggagaagtcaacgaaacgacgggtcagggtaacggtatcaacgatgtcgtcgcccttaaaacgttcttctactttcaggccggtacgcacgtcggaaaaacgcattttatacagcgttgctgcgccacgggcgcttggcgactgaatatcaatatttttaacaatcagcagtttgccgttgtaattcagcaccataccttttttaatttcattcgctcttggcattgcagtaatcctgtcacttaaagggtcaaaaatatcgcgtaaaactactcgcgccgggcctttcaggcaagcggaattcgcgacttttgctatctcctggcaaatcttcgatcggcgctgctgaaaaagccgtgtcgccagcttcagctttcctgatagccgatattttgctactgtccgcctcccactcattaaggagtcaggtatggaatgtcgcccggactgcggagcctgttgcaccgcgccgtccatctcaagccccattcccggaatgcctgacggcaagccggctaacaccccatgcgtgcagctggatgaacatctgcgctgcaagatttttgcctcgccgctgcgccctaaagtctgcgcgggtttacaaccggccgcggaaatgtgcggcagcacgcgtcagcaggcgatggcttatctcattcatctcgaagcgctaaccgcgccttaaacgtctttaattcgccacaggcagccctgagcgataattcccatcattagcgcaatccagaacaccgcgtgatagttccagatttccgcgacaacgcccgccagcgagccggcgatgatccagccgacgcgcgtggtattggtatacagcgtagtcgccgcgcccgcctggcccggcatcagatcctgaaaatagagcataccgataccggcgaggatcccgatgtaaatcgcgttcagcgcctgcatcgccagcaacagggccggggtatggacagtcagcataccgacataaaacagcagtccggcaagcgcggcaatgcgcatcagcaagcgctttccaaaacgtttcgcgtaataaccggcaatcagcatggtggggatttccagcccggcggcggtccccatcatcagcccggctagtttctccggcagatgcagttcattaatgataaacagcggcatattaatgatatagaggctgttggtgccccacattaacgtacagatgctgaacagcagcagcgcatcgcggcggttggtgcgcggcgcttcaagatgaccaccggcggttttgctctctttacgcatgctgggcaggaagaaccagaccatcagcgcgcagacgataaacgccacggcggcgctgagatacatcacggtaaaaccaaaacccatcgccagcgcgtaggccagcggcgggccgatcacccacgccagcgagacctgcgcgcgcagaatggagctgaacatcaccgcctcgcgcccggttttgtccgcgtgctcgcgggcgagggcgaacatttgtgggttggcggtggagccaaaactactgagaaagacgccgacgaacagcagaataaagtagttgcggttccaggcgaacagcacgcaggccagcacccccagcaggcagcaggcaacaatcagctgcttgcgatcgcctttacgatcggaacgcccggcaagaaactgacttaccagaatgccgatgaccgcgctgccggtaaaaaaaaagccgaccattgccgggcgaacgtgcacctcattggttagaaacaggctcagggtcggggtctgtaaggccccggcgatccccgtcagaaaggcgacgataagaaaagcggaggaggttaagtcgaacccgcggcggggaagggcggcgctactgttttgcatgctggaatatcattggtttcaggagaggcgaagtttacgccgacacccataaaatgaatagtggtatggcacgaaaaattaaaaaggcgtttcaaattatgttgttcagcaaaatgctgaagccaatggcgcgtttcaccattagcttcagcaaaaatgtgcggtatctctaaattctgttatcaaccttcggagtttacttgcgcagtgcgcaagaaaggtacagactcattgaaacgtttcagcgtcatcagagtattatccagtcatcgggtggcgtattttttctcatgttagctgaaacgattcaattcagcggagaggagaactatgttccagttatctgtacaggatatccatcccggccagcaggccgcgaataaagaagaggcaatacgtcagattgctggcgtgctggttagcgcgggtaatgtggctgacggctacgttaacggtatgcttgcccgcgagcagcagacctccactttcctcggcaatggcatcgctatcccgcacggcaccaccgatacccgcgaccaggttctgaaaacgggcgtccaggtgtatcagttcccgcagggcgtgacctggggagaaggacaaaccgcttatgtggcgatcggtattgccgccagctccgacgagcacctcggtctgctgcgtcagttgacgcacgtcctgagcgacgattcggtggctgaacagttgagaaccgtcaccaccgcagaagaactgcgcgctctgctgatgggcgaaaagcaaagcgaagcgctgaagctcgacaacgaaacgttgagcctcgacgtggtcgccaacgatctgctgacgctgcaggcgctgaacgccgcgcggctgaaagaggcgggggcggtaaacgccgatttcgtcagccgcactattaatgatgcgccgctcaacctgggccaggggatctggttgaacgactgtgcggaaggcaacctgcgcagcgccgttgccgtgagtcgcgccgccaatgcgtttaccgctgacgggcagccggtggcgctgctgatcaccgtcgcgatggccgatgagcagccgaccgcggtgcttcatcgcctgagcaatctgcttattgataaaaaagcggagcatctgctgaaagccgacgccgccacgctgctggcgctgctgaccagcgacgacgccattgctgaagacgtgctgaacgccgagtttgtggtacgcaacgagcacgggctgcacgcacgtccgggcacgatgctggtgaatacgattaaacaattctccagcgacattaccgttaccaacctcgatggttccggcaagccggccaatggccgcagcctgatgaaggtcgtggcgctgggtgtgaaaaaaggtcaccgtctgcgttttaccgcgcagggtgaagatgcgcaacaagcgctggatgcgattggcgaagcgatcgccgcaggccttggggagggcgcataaatgagcagacgtgtagcaacgattactttaaatccggcatacgacctggtgggtttcaccccggaaatcgaacgtggcgaagtgaacctggtacgtaccactggcctgcatgcggcaggcaaaggtatcaacgtggcgaaggtgctgaaagatcttggcatcgacgtcaccgtcggcggcttcctcggtaaagataaccaggatggcttccagcagctgtttagcgagctgggtatcgccaaccgcttccaggtggtgcaggggcgtacccgtattaacgtcaagctgacggaaaaagatggcgaagtgaccgatttcaacttctccggtttcgaagtgaccccggcggactgggagcgtttcgttaatgattctctgagctggctggggcagttcgatatggtttgcgtcagcggcagcctgccgtccggcgtgagtccggaagcctttaccgactggatgacgcgcctgcgcagccagtgcccgtgcattattttcgatagcagccgcgaagcgctggttgcagggctgaaagccgcgccgtggctggtaaaaccaaaccgccgcgagctggaaatctgggctggccgcaagttgccggagatgaaagatgttatcgacgccgcccatgcgctgcgcgagcaaggtatcgcccacgtggtgatttcgttaggcgaagagggtgcgctgtgggttaacgcctccggcgaatggattgccaaaccgccttcagtagaagtcgtcagcaccgtcggcgccggtgattcgatggtcggcggcctgatttacggcctgctgatgcgtgaatccagcgagcataccctgcgcctggcgaccgccgtcgccgccctggccgttagccagagcaacgttggcattaccgatcgtacccagttggccgcaatgatggcgcgcgtcgacttacaaccctttaattgacagcaggagaggcataatgaaaacgctgctgattattgatgccgggcttggccaggctcgcgcctacatggcgaagaccctgctcagcgccgcggcgcagaaagcgcaccttgagctgattgataacccgaacgatgccgaactggccatcgtgctgggaaccgcactgccggctgacagcgcgctgaacggtaaaaacgtctttctgggcgatattaaccgtgctgtcgcccatccggagctgttcctgggtgaagcgaaagatcacgctaagccgtacgttgcgccagcggcggtagccgttccggccgccgcccaggggcagaaacgtattgtcgccgttaccgcttgtccgaccggcgtagctcatacctttatggcggcggaagccattgaaaccgaggctaaaaaacgcggctggtgggtgaaagtggaaacccgtggttccgtgggggccggtaatgccattactccggaagaggtggagcaggcggatctggtgatcgtcgccgccgatatcgaagtcgatctggcgaagttcgccggtaaaccgatgtatcgcaccaccaccggactggcactgaagaaaaccgcgcaggagctggataaagccgttgctgaagcgaagccgtaccagccatccggcaaaccgcaggcctccggtgacggtaaaaaagagtcggctggcgcctatcgtcacctgctgaccggcgtctcctacatgctgccgatggtggtcgcgggcggtctgtgtatcgcgctgtcgttcgcgttcggtattaaagcgtttgaagtgaaagacaccatggcggcggcgttgatgcaaatcggcggcgggtcagcctttgcgctgatggtgccggtactggcaggctttatcgcgttctccatcgctgaccgtccgggtctgacgcctggtcttatcggcggtatgctggccgtcagcggcggttccggcttcatcggcggtattatcgccggtttccttgccggttatgtggcgaagttaatcagcactaagctgaaactgccgcagagtatggaagcgttgaagccgattctgatcattccactgatttccagcctgattgttggtctggcgatgatctacctgatcggtaaaccggtggcgggtatcctggcctggctcacccactggctgcaaaccatggggacggcgaacgcggtgctgctcggcgcgatccttggcggcatgatgtgtaccgatatgggcggcccggtgaacaaagcggcttatgctttcggtgtgggtctgttgagtactcaaacctatgcgccgatggcggcgattatggcggccggtatggtgccaccgttggcgcttggcctggcgacgctgattgcccgcaacaagttcgacaaatcacagcgtgaaggcggtaaagcggcgctggttctgggtctgtgctttattaccgaaggggcgattccattcgccgcacgtgacccgatgcgcgtactgccttgctgtatcgttggcggcgcggtgaccggcgctatctcgatggcggttggcgcgaaactgatggcgccgcatggcggtctgttcgttctgctgatcccaggcgccatcactccggtgctgggttatctgctggcgattattgccggtacgctggttgcgggtctctcttacgcggtgctgaagcgcccggaagcgccggcggcggaagctgaaaaagcggcgtaatataagcgcaataaaaaagggccgatttgtcggccctttttttgtgtctggattcaggccacttcggcggtctgctgcgcccgcagccaggcaatttcttccgcccagatatccgggttaatggtttccagaatcagcgggataccatcgaaacggttatcctgcatgatccaacgaaaagcatcatggccgatattgccttcacccaggctatggtgacggtcgacgcggctgccaaaagcgcttttggcatcattcaggtgcatgccgcgcagatactggaagccgacgatccgttcgaattcggcgaaggtcttttcacactcctccgcgctgcgtaggtcatagccggcggctaaagcgtggcaggtatcgatgcagacgccaacgcgggatttgtcttcaacgccgtcaatgatggcggcaagatgctcaaatttaaaaccgaggttactgccctgaccggcggtattttcgataaccgcggtcacgccttcggttttcgccagcgcgatgttgatggattcagcgatacgcgccaggcattcatcttccgggatctgctgcaggtggctgcccggatggaagttgagcagcgttaatcccaactgctggcagcgggttaattcatcgataaacgcctcgcgggatttctccagcgcttcttcgaccgggtgaccgaggttaatcaggtagctgtcgtgcggcaggatctgccccgggccgaagtgatatttttcgcaggcggctttgaattcggcaatcgcttcgtcggtgagcggcgcggcgcgccattgacgctgatttttggtgaacagggcgaaggcggtcgcttcgatttcggcggcgcggatggcggcattggccagcccgccggaggcgctaacgtgcgctccaatatatttcataaaaaaactccagttaagccgctggggggagggtaatgatagcggcttaaccggagagttacagcaatgaatgaatatcgacgagaaaacttactgcttagccaatcaggtggtggatagcgaagttaatcgcgccgccgccaacaatcagccagacgaacagcatcagcgccatcagcagcggcttcgcaccggcttttttcagtgcgctgacgtgggtggttaagcccagcgcggccatcgccatcgccagcagtacggtatcgagggtgaccagcatatcgacgacggctttcggcagcaggtggaaggagttaaataccgccaccagaataaacagaatggcaaaccacggaatggtgattttgctcttttcgccgttaccggctggcgccagttgtttcacacgagcagcaatgaacagcaggaacggagccagcatcatcacgcgcagcattttggcgataaccgccgcattttcggcgtccgggctaaccgcatgaccggcggcgaccacctgagcgacttcatgcatggtggagcccatatagatgccgtaggcttccggagtgaaccagtgcgccagcagcgggtacatcgccgggtagaggaagatagcgatagtaccgaagataaccactgtcgccacggcgaccgtcactttactggcttcggctttgacgaccggctcggtggccaggaccgccgcggcgccgcagatgctgctaccggcgccgataagccagctggtatgtttatcgagcccgaaaaccttctgcccgaggaaacaggcgataaagaaagtgctggacagcgtcagtacgtcaatcaggatcccgctgacgccgacgtcagcaatctgggcaaacgtcagacgaaaaccataaagaatgatccccatgcgcagcagatactgcttggcgaaaatcaccccgccgtcgcaggactgccaaattttgggataaacggtgttaccgaccaccatgccgaacaagattgccagcgtcagcgcgctgaagcccgcgccggcgatagcagggaaactgcctgcccacagggcggcgcaggtcaacgcggcggtcagcgccaggcctgggacgaaatgccacagggtgcgatgtttagtgggtaaagtgagtgctgtcataaccttctcctttgtctgggcaaagaatacgactggctggtttaaaaataaaattgattatatatttataatctatcggaataagtgataaacccttcatccttcgcgctgcagatgtgttggctgcgtttactcaccccagtcacttactgatgtaagctcctggggattaatgagggacatccttgtccctcaccggaggccagcctttgactggtcaaattcgttcctgacgaatttgtcgctcacttgccgcctttctgcagcacgaatgattttgggttatacccttcatccttcaggccacagccctgctgatttatgtcaacatagcgttgacggttatccagcttgggctaataaacaggtgagttatgcatatcacgctacggcaactggaagtttttgctgaggttttgaaaagcgggtcaacgacgcaggcgtcacagatgctggcgctgtcgcagtcggcggtgagcgcggcgctaaccgacctggaggggcaactcggcgttcagctgtttgaccgcgtcggtaaacggctggtggtcaacgagcatggccgcttgctctacccgcgggcgctggcgctgctggagcgcgccggagagatagaacagctgtttcgcggcgataatggcgcgatccgcgtttatgccagtagcaccatcggcaactatattctgccggaaatcatcgcccgctaccgccgcgacttccccgaactgccgctggagctgagcgtcggcaacagccaggatgtgattaatgcggtcagcgatttgcgcgtcgatattggcctgattgaagggccgtgccacgcggcggatattatcgccgagccgtggattgaagatgaactggtggtgttcgccgcccctgattcgccattcctggaaggcgaattgacgctgcaacggctggcggaagcgcagtggatcctgcgcgagcatggctccggcacgcgggagatcgtcgattatgtgctgttgtcgcatctgcccgcatttcaactgggcatggagcttggcaactcggaggcgattaaacatgcggtccgccacggactaggcatcagctgcctgtcgcggcgagtcattgccgagcagctggaggccggaacgctggtggagctcaagctgccgctgccgcgcctgacgcgcacgttatggcgtattcgccatcggcaaaaacacgtttccaaggcgctgcagcgctttatccgttactgcgaggtgtagcggtatcccttattggcgcgtagccgtgctgcacgcagatctccggggttctggcataatgccagctgcccatgggaacgggttcccagcagcgaatgtagcgcggcgagccgtataccgtaaaatgtaaggtaaaaatggcgctgttgatgacgatcagcagcgccagcgtaaatccggcgatagcggtcagcaggcgattttcataacttccatcgacggttttaccacgcagcactctgcccatccgccaggcgaatgaaaaaaagagcagcgcggagccggtaaaattggccttcagtaaggaaacggaggcgaagtccggccaaccgcgtaatttcagtaatggcagatagtcggttgctaaatagagcgcgtaaacccctagcgccggaaaaataagccatgcgtttagctgttgccagattcgctgtgcgcgagtggcctgcggttcggcgttagcaacttttgctggtttcttcacggggtattctccctattagcaatgggggagggggtttgcacccttttgtcgaaatggtcgcaccagtcgctattccacacgtacatataaatggtgtgtttgctgtattgcttgcatacgccgtactgcgggttatcccgatagtggtccatcgtgcgccagtccagccaggcgaaagccgcaatatagataagagaaaaggcgcagaagactttgcatagccgaaccatcagccgctttttcactccgacgcccgccagtagccccagcagccccgcaatcgcaagaggaagcgcgccgacaagaaaagtctccctgttatcggtcaggtaattcggcagccgcaaccagtgttccagcaccgtgatactggcgtacaggccaataacgaatagatacaggcagaaaatcgccagtagcagaaaggcatcgggggccaggctgcgacgagtgggggaaaccataagctgactccttcagcattgtgacaatcctcgcgttattttgccgtaagccgcgattttttgtctgtttttttatgcgccaatgcaggattactgctttactaataatttgtgtcagatcatgaagctctcttataactttgcatttgtaccggatggatggacgatcgtctgctacaatcgcgcctcattttttggatggatagcattttcacatggtttcggaaactaaaaccacagaagcgcccacgctccgccgcgagctaaaagcgcgccacttgaccatgatcgctattggcggttccatcggtacaggtcttttcgttgcctctggcgcaacaatttctcaggcaggccccggcggcgcgctgctttcctacattctgatcggtctgatggtgtatttcctgatgaccagcctcggcgagctggcggcgtttatgccggtttcaggctcttttgcgacctacggtcagaactatgtagaagaaggctttggtttcgcgctgggctggaactactggtacaactgggcggtgactatcgccgttgacctcgttgcttcgcagctggtgatgagctactggttcccggatacacccggctggatctggagcgccttattcctcggcatcatgttcctgctgaactggatctcggtacgcggcttcggcgaagcggagtactggttctcgctgattaaagttgccaccgtgattatctttatcatcgtcggcattatgatgatttttggcattttcgaaggcgccaagccggcgggctggagcaactggggcattgatgatgcgccgtttgccggcggttttgcggcgatgatcggcgtggcgatgattgtcggcttctccttccaggggaccgagctcatcggtattgccgcgggcgaatcggaaaatccggagaagaacattccgcgcgcggtgcgtcaggtgttctggcgtatcctgctgttctatgtcttcgcgattttgattatcagcctgatcatcccgtataccgatccgagcctgctgcgcaacgacgttaaagacatttccgttagcccgttcaccctggtattcgagcacgccggtctgctctctgcggcggcgatcatgaacgcggttatcctgacggcggtgctgtcggcgggtaactccgggatgtacgcctctacgcgtatgttgtataccctggcgtgcgacggcaaagcgccgcgcattttctcgaagctgtcgagaggcggcgtaccgcgcaacgcgctgtatgcgactaccgtgattgcggcgctgtgcttcctgacctcgatgttcggcaaccagacggtctacctgtggctgctgaatacctccgggatgactggctttatcgcctggttgggtattgcgatcagccactaccgtttccgtcgtggttacgtgttgcagggtaacgatattaataacctgccgtaccgttccgggttcttcccgctggggccgatcttcgccttcgtactgtgcctgatcatcacccttggccagaactatgaagccttcctcaaggacaccattgattggggcggcgtggcggcgacctacatcggcattccgctgttcctggttatctggtttggttacaagctggtgaaaggtacccgcttcgtgcgctacagcgaaatgaagttcccggaacgctttaaaggctaattccacactctaccgttttcgataaagccctcttttaaagagggctttttttatgccagcaaggcttacaaacggacacacttcttcataattgtattgataattgtaatcattatccttatcatttcggcaaattcaggatgaagccaatctccatatcttgccgctcaactacgaaaggcaaggggtgaccagccacatcgactgtaaaaaaattgcgcgcggccgccagagccgcgtgtcgacaggatgtgcaagcagcaccctttgtttgatttgtagttgacctcatggagatttggtatgttcaggttaaacccttttgcccgggcgggactgtgcgcgtccgtcgtagcattggcatttccggcgctggccgcaaatgatgacgaaacgctggttgtcaccgccgcggcgactgaacagagcgtcaaagatgcgcccgccagtatcagcgtgatcacccaacaggacttgcagcgtaagccggtgcagaacctgaaggacgtgttgcgcgatgtgcctggcgttcagctcaccaacgaaggggataaccgcaagggtgtcagcatccgcggtctggatagcagctatacgctaatcctgatcgatggcaaacgtgtcaactcgcgtaacgccgtcttccgccataacgatttcgatctgaactggatcccggtggactccatcgaacggattgaagtggtgcgcggcccgatgtcttccctgtacggttccgatgcgctcggcggcgtggtcaatatcattaccaaaaaaatcggccagaaatggaccggtaccctcagcagcgatgccaccattcaggaacaccgcgatcgcggtgacacttataacggccagttcttcaccagcggcccgctgattgacggcgtgctgggcatgaaagcctacggcagcctggcgaaacgcagtaaagacgatcagcaatcttccagcaacgccgcgggcgaaacgccgcgcattgaaggttttaccagccgcgacggcaacgttgagttcgcctggacgccaacggagaaccaggacattaccgccggctacggtttcgatcgccaggatcgcgattcagactcgctcgacaaaaaccgccttgagcgtcagaactactctttgacccataacgggcgctgggatgtcggcaatagcgaagtgaaattctacggcgagaaagtggataacaaaaacccggggcaggctgggaccattacctctgaaagcaatgcggtggatggtaaatatgtgatgccgctgggtatgatcaaccagatcgtcaccctcggtggtgaatggcgccacgataaactcaaagatccggtgaacctgagcagcggcggcaaatcgacttccgccagccagtacgcgctgttcctcgaagacgagtggcggatctttgaaccactggcgctgaccaccggcatccgtatggacgatcaccaaacctacggcgatcactggagcccgcgtgcgtatctggtctataacgccaccgataccgtgaccgtgaaaggcggttgggcaacggcctttaaagcgccgtcgctgctgcaattgaacccggactggaccaccaactcctgtcgcggtagctgcagcattatcggtaacccggatttgaagccggaaaccagcgaaagctttgagctcggtctgtattacagcggtgaagagggctggctggagggagttgaaggcagcgtgaccgccttccagaacaacgttgacgatatgatcgacatcctgcgcacctccagcgccagcgaagcgccgggttacccgaacttcgtcggctggaagaccgtgaacggtaagcgtgtgccggtgttccgttacttcaacgtcaacaaagcgcggattaaaggcgtagagaccgaagtgaaggttccgttcggcgaagagtggaaactgacggtcaactatacctataacgatggtcgcgatctgagcaacggcggcaataaaccgctgcagacgctgccgttccacaccgctaacggtaccctcgactggaaaccgctggaggattggtctttctacgtcacggccaactataccggcgagcagcgtgcggtaagcgcgacgggtaaaaccccaggcggttataccatgttcgatatcggcgccgcgtggcaggtcagtaaaaacgtgaaactgcgctccggcgtgcttaacgttggcgacaaagatctgaaccgcgacgattacagctacaccgaagatggccgtcgctactttatggccgtcgattaccgcttctgatagcgataaactgtctgccgccgctgaagtaacttcagtggcggcagccccgataatacgtgtacgccgctatccgccaggtatcagccgcttgcccctttcatccaccaccttttctccatcctctttgctaaaagcgccttgctgcggatcgggcaggatatccagtaccacttcagatggccgacataagcgggttccccgttcagtgaccacaatagggcgattaatcaggatgggatgagcgagcataaattctattaactgctcgtcggtgaacttgtcctccgcgagtcccaactgagcataaggttcaacattctcgcgtagcagagtacgcacggcgatccccatctctgcgataagtttaaccagctcaccgtgagtcggcggtgtttcaaggtagtgaataacggtgggttcattaccgctgttacggatcatctccagtgtattacgtgacgtgccgcaggccgggttgtgatagatggtgatattactcatatgagtttctcgttatagagtgagagagagccgcagcgccagcgcggccagagtgacaaacagcacaggtagcgtcatgacgatgcccgtgcggaagtaatatccccaactgatggtcatgcttttctgcgacagtacgtgcagccacagcagggtcgccagactgcctattggcgtgattttggggcctaaatcgcacccgatcacgttggcgtagatcatcgcttctttaataacgccagaagcggtgcttccttcaatcgacagtgcgcccaccaggaccgttggcatattgttcattaccgacgacaggaaagcggtcaggaagcccgtgccaaacgttgccgccagcagtcccttatccgccagcatattcagcgtacccgatagatattccgttaagcccgcattgcgcagaccgtagaccaccaggtacatacccagcgagaaaataacgatctgccagggcgcgccgcgcaatactttaccggtattgatggcgtgaccttttttcgcaacggcaaacagaacagcggctccgacagcggcgatggcgctaacgggcagccccagcggttcaagaacaaagaaaccaaccagcaacaaaagcaaaacaacccagccggctttgaaggttgcgggatctttaatcgcgctggcaggtgttttcagcaaagtgacgttgtaagttgctggaatatcccggcggaaaaacagatgcagcatgcccagcgtggccgctatggcagcaatatcaacaggaaccatcacagaggcgtattgcgtaaaaccaagccggaagaaatcagctgagacaatattgaccagattggaaacgataagcggcaggctggcggtatcggcaataaacccggcagccatgacaaaggctaatgttgtccttttgctgaaccccagagcgagcagcatggcaatgacgatgggcgtcagaatgagcgctgcgccatcgttagcaaacagcgccgcaacggtcgcgcctaacaggataatccaggtgaacagcagacgaccgcgcccgttgccccagcgggagacatgcagcgcagcccattcaaaaaagcccgactcatcgagcagcaggctgatgataatcaccgcgataaaagttgctgttgcgttccagacgatattccagacaacgggaatatcactgagatgaataacgccgctggccagcgccagtattgcgccaatactcgcgctccagccgatgctgaggcccctgggctgccagataaccaacaccagcgtgaataaaaagagactaccggccaacaacattctctactccgatatatgcgtttctatatatgtatcaacaggtggcgcacgctgttttcttgcgccattcgtcaatatcttccctcatgctctgcctggtcgtggcaatgatctccgccgcccaggccggcatatggggcgagaggcgatagtggacccatttcccttgccggcggtcgagtaccagttcagattcacgtaatatcgccatatggcgagatattttcggctgggattgcccggtggcggcacacagatcgcagacgcacagttcgccggactcacgcagcaacatgatgatggctaaacgggtttcatcccccaggattttaaacagctggataggctttatcatggttgaccagattatcatggaggtacatatatgctaaatcatatatgttgtgttttaaataacaaattatcgcccgtagcgacaagatagttcctgacgaagatataaagccgggcaagcggagcatgcccggcggagggaaatagagggttacttaaacagatgctccgcgtggaagcgcagatgatcttctataaaggtggcgatgaaatagtagctgtggtcgtagccgggctggatacgcaggctcagcggccactgtttctgtcgcgccgcctctgcaaggaccgcgggctgtagctgggtaccgagaaactggtcggcgtcaccttgatcaattaatgtgggaatggcatccccggcctggcttgcctgcatgagtgcgcagctgtcccactcctgccaggtcgcctcatcatcgccgagataggcgctgaacgccttttgtccccacggaactttgcatgggttgacgatcggcgcgaaggccgagacgctggtaaagcgccctgggtttttcagcgccatgatgagcgcgccgtggccgcccatcgagtggccgctgatagcgcaacggtcggcgacctgaaattggttgttaatcaactgcggtagctcatcgcgcaggtagtcatacatgcgaaaatgcgccgcccacggcgcctgagtggcgttgaggtaaaaaccagcccctttaccgagatcgtaaccggcatcatcggcgacgtcatcaccgcgcgggctggtgtcgggcatcaccagcgcgatgcccagttcggcggcgacacgctgggcgccagccttggtggtgaagttttcgtcattgcaggtcaaaccggatagccagtacagcaccggcggcggggcggtttccgtcgccggcggtaaaaagatgctaaacgtcatggcgcagttcagggtactggagtgatgacgccagcgctgctgtcgaccctcgtaacagcgatgctcttcaagcagttccatgcagggctcctcgggtatctatgtgtaatgcttaataatacagatatttcattaaccggtgagcaactttcactttcccgtcgcgcaaagctattgcatcattaatacgagttataaagaacgtctctaaacatctacagtgctaatgaatgcgcgcgagggcggtagggctcgctggcgtggcgcatcgacaacgtccaaccgcagcggtaaaaatgaaaggttgcgccaatttcaataattatcgtgacggctactggattatgtgcgccacctcacgcacaatgagtgcaaactttgccctcagaagagcaaagagcgccacacctgcaggagaacctaaatgtcatcattgagtaaagaagccatactcgttcatgaagcgctggtcgctcgtgggctggagacgccgctgcgtccgccagtacaagaaattgataatgaaacgcgcaagcgtctgatcgccgggcacatgactgagattatgcaactgctgaatcttgatctcagtgacgacagcctgatggaaactccgcatcgcatcgcaaaaatgtacgttgatgagattttctccggtctggattacgccagattcccgaaaatcaccgttattgaaaacaaaatgaaagttgacgagatggtgacggtccgcgatatcacgctgaccagtacctgtgaacatcactttgtgacgattgacggcaaagcgaccgttgcttatatcccgaaagattcggtaatcggcctgtcgaaaattaaccgcatcgtgcagttctttgcccagcgtccgcaggtgcaggagcgcctgacgcagcagattcttaccgcgctgcagactttgctcggtaccagcaacgtcgcggtatccattgacgcggtgcattactgcgtgaaagcgcgcggcatccgcgatgcgaccagcgccacgaccaccacttcgcttggcggtctgtttaaatccagccagaatacccgccaggagttcctgcgcgccgtacgtcaccacaattaattcggagcagggtgcatggagagaaacgtcacgctggacttcgttcgcggcgtcgccatcctcggcattctgctactgaatatcaccgccttcggcttaccgaaggcggcctatctgaatccggcctgggccgggagtatttcgccgagcgacgcctggagctgggcaatcctcgacctgtttgcgcaggtaaaattcctcaccctgtttgcactgctgttcggcgccggattgcaaatgctgctggtacgcggtaaacgctggatccagtcgcggctaacgctgcttgccctgcttggttttattcacggtctctttttctgggacggcgatattctgctggcctatgcgctggtggggctgattgcctggcgcatggtgcgcgatgcccatcatgtcaaatcgctatttaataccggcgtcgtgctttatctcatcggtattgcggtgctggtattgttgggattaatttccggcaacggcgccagtcggtcatgggtgcccgatgccgcgaatgtgcagtatgagcagttctggaagctcaaaggcggtatggaggcggtgagcaatcgcgcggatatgctgtccgataacctggtggcgctgggcgtgcagtacggctggcagctggcggggatgatgctaatgggcgcggcgctaatgcgctgcggctggttgaaagggcagtttagccttagccattatcgccgcgtcggggctgtgctgattattgccggaatgatggtaaatgtgccggccatcgccgcgcagtggtatttgcaatgggactaccgctggtgcggttttctgctgcaggcgccgcgtgaacttggcgcgccgctacaaaccatcggctatgccgcgctggcgtggggattctggccgcaattatgccgctttcgtctggttggggcgattgcctgcgttgggcggatggcgctcagtaactatttactgcaaaccctgatctgcaccacgctgttctatcatctgggcctgtttatgaaatttgaccgtttacagctgttggcctttgtgccggcggtgtgggccgttaatctcctcttctcgcagttttggctgcgtcatttccgccaggggcccgttgagtggctatggcgtcagttaaccctgagagcctcagggacatcatccagagatacatctgtataacgatctcgatcacaatcattaacaaaatggatgtaaccgtttccagccgtgtgacctcactcacgtagcgcggtgcgcgtcgctgccagaatagccaccttgctgaacacaggaggtgggtgtgacgtattgcaatgcgataaaggcgggtatgtatgatcaccattcgtgatgtcgcccgtcaggcgggggtttccgtggcgacggtttcacgggttctgaacaacagcgcgctggtgagcccggatacccgggaggcagtgatgaaggcggtcgcgcaactgggctatcggccgaatgccaatgcccaggcgctggcgacccaggttagcgataccattggcgtagtggtgatggatgtgtcagacgcctttttcggcgcgctggtgaaagcggtggataccgtcgcgcagcagcatcagaaatatgtgctaatcggcaacagctaccatgaagctgaaaaagagcgtaacgccattgaggtgctgattcgccagcgctgttcggcgcttatcgtgcattcgaaagcgttaagcgatgccgaacttggcgactttatgcagcatattccaggcatggtgctgataaaccgcattgtgccgggcttcgcgcaccgctgcgtgggtctcgataacgtcagcggcgcgctaatggctacgcggatgctgctcaatcacggccatcaacggattggctatctctcttccaaccacggcattgaagatgatgaactgcgccgcgaagggtggagtaaagcgctgcaggagcagggcattatcgcgccggatagctgggtgggctcgggttcgccggatatgcagggcggtgaagcggcgatggtagaactgctggggcgtaatttaggcctgaccgcggtgtttgcctataacgacagtatggctgccggggcgttaaccactctcaaggataacggcattgccgtgccgcagcatctctcgctgattggttttgatgacattcccatttcccgttacaccgatccgcagttgactaccgtgcgctatcccattatgtcgatggcgaaattggctaccgaactggcgctacaaggggcggcagggaaactcgatagcgaggccagccactgctttatgcccacgctggtgcggcgccattcggtgacgcaaaagcaaagtgtggggccgatcactaactgaatctattagctgatgtaaccgctttcaatctgtgagtaaattcacagtatattaacattcagctgtttatgatggcagcgttgaccagtccgaaccagactgtacaggtgatgttttaaaatatcatcttaaacaataggttaggcacttgatgaagccgtttttctggagcgttaccctacacggaagacagaattaacgttgtgaatatcgttgtgcggtaaccctaatgtaacaactcccgccagctatcttcacgccaaaaaaaacgatgcaaaataataaaaccggagattccatgaataagaaggtcttagctctgtccgccgtcatggctggcatgctttttggcgccgcagcgcatgccgcggatacccgtatcggcgttacgatctacaagtatgacgacaacttcatgtccgttgtgcgtaaagcgatcgaaaaagacggcaaatctgcgccggacgtgcaactgctgatgaatgactcgcagaacgatcagtccaaacagaacgatcagatcgacgtgctgctggcgaaaggggtgaaggcgctggccatcaacctggttgacccggcggcggcgggtacggttatcgacaaagcgcgtgggcaaaatgtgccggtggtgttctttaacaaagagccatcgcgcaaggcgctggatagctacgataaagcctattatgtgggtaccgactccaaagaatccgggattatccagggcgatcttatcgccaaacactggaaagcgaatccaaactgggatctgaacaaagatggtcagattcagtttgttctgttgaaaggcgagccgggccacccggatgccgaagcgcgtacttcctacgttatcaaagagctgaatgaaaaaggtcttaaaactcagcaactggcgttagataccgccatgtgggataccgcgcaagcgaaagataaaatggacgcctggctctccggcccgaacgccaacaaaatcgaagtggtcatcgcgaacaacgatgcgatggcgatgggcgcggtagaagcgctgaaagcgcataacaagagcagcattccggtgttcggcgtcgatgccctgcctgaagcgctggcgctggtgaaatccggcgcgatggccggtaccgtgctgaacgacgccaacaaccaggccaaagcgaccttcgatctggcgaagaacctggctgacggcaaagagcccgctgctggcaccaactggaaaattgagaataagattgtccgcgtaccgtacgtaggcgtagataaagacaacctcagccagtttatcggtaaataagttcttcatgcattgcgggcgcgctcgcgcgcccgattattcctgataccgaagccgattttgctgcgatataacttatcgtcgcggatcggcacgaacgcagccaggtataactatggtcagcaataatagcgtacagtcgggcgaatatttgttggaaatgagtgacatcaacaaatctttccccggcgttaaagctcttgataatgtcaacctgaaggttcgtccgcactctatccatgcattaatgggtgagaatggcgcgggtaaatcgacattattaaaatgcttatttggaatctatcaaaaagattccggcagtattctttttcagggaaaagaaatcgatttccattcggcgaaagaagcgttggaaaacggtatttctatggtgcaccaggaattaaacctggtacttcaacgttcggtcatggacaacatgtggctgggacgttaccccaccaaaggcatgtttgtcgatcaggataaaatgtatcgcgataccaaagcgatatttgatgaactcgatattgatattgatccgcgcgctcgcgtggggactttatcggtatcgcagatgcagatgattgaaattgccaaagcattctcctatgacgcgaaaatcgtcattatggatgagcctacctcatcgctgacagaaaaagaggtcaatcacctgtttaaaataatccgcaagctgaaagagcgtggctgcggtattgtttatatctcccataaaatggaggagatatttcagctatgcgatgagattacgatcctgcgcgatggtcagtggattgccacccagccgctggaggggctggatatggataagatcatcgcgatgatggttggccgttcgctgaaccagcgttttccggataaacaaaacaaaccgggcgaagtaatccttgaagttcgtaacctgacctcgctgcgccagccgtcaattcgcgatgtctcattcgatctgcataaaggtgaaatcctcggcattgccggactggtgggcgctaaacgtaccgatattgttgaaacgctgtttggcatccgcgaaaaggccagcggcacaattaccctgcatggcaaaaaaattaataaccatagcgctaacgaggcgataaaccacggctttgcgctggtgaccgaagagcgtcgctcgacgggaatttatgcttacctcgatattggttttaactcgctgatatcaaatatcaagaagtataaaaacaaggtcggtctgctggataattcgcggatgaaaagcgacacccaatgggttatcgattccatgcgggttaaaaccccaggccatcaaacgcaaatcggttcgctgtccggcgggaatcagcagaaggttattatcggtcgttggttattaacccaaccggaaatattaatgcttgatgaaccgacccgcgggattgacgtcggggccaaattcgaaatttatcagctgattgccgaactggccaaaaaagataagggcatcattattatctcttctgaaatgccggagctgctgggaattaccgaccgtatactggttatgagcaacgggctggttgccggaattgttgagaccaaaaccacgacgcaaaatgaaattctgcgtcttgcatcattgcacctttgagatcaggggctttccatgagtgcgttaaataaaaagagtttcctcacttacctgaaagagggtgggatttacgttgtacttttggtcttactggccattattattttccaggacccgaccttcttaagtctgttgaacttaagtaacatcctgacgcaatcctcggtacgtattatcatcgcgctcggcgtcgccgggctgattgtcacccaggggaccgacctttccgccggacgtcaggtgggtctggcggcggtggtagcggctaccatgctgcaggcggtggataacgccaacaaggtgttcccggagatggcgaccatgccgattccgttggtgattctgctggtctgcgcgatcggcgcggtgattggcttgattaacggtatcgtcattgcctatctcaacgtgacgccgtttatcactaccctggggacgatgattatcgtttacggtatcaactccctgtactacgactttgtcggcgcgtcgccgatttccggtttcgacagccacttctcgcagtttgcccagggctttgtcgctttaggttcattccgcctgtcgtacatcactttctacgcgctgatcgctatcttcttcgtgtggatcctgtggaataaaacccgtttcggtaaaaacatcttcgctatcggcggcaacccggaagcggcgcgtgtctccggcgttaacgtggcgctgaacctgctgatgatttatgccctgtccggggtgttttacgccttcggcgggctgctggaagccggacgtatcggttcggcgaccaacaacctcggctttatgtacgaactggatgcgattgccgcctgcgtggtggggggcgtttccttcagcggcggcgtgggtacggttttcggcgtggtgaccggggtcattatttttaccgtcatcaactatggtctgacctacattggcgtcaatccatactggcagtacattattaaaggggcgattatcatcttcgctgtggcgctggattcactgaagtacgcgcgtaagaaataagattgaacatataaaaaacccgcgcctggcgcgggttttttatgcctgaaattcgataaaacgacggcggctatttttctttctgtagctccagtaactgctcgggcgtgaccgccgggtaggattgcgcatcctccggaacttcatgctgctgcgccggaatggggatcagcggcccgaggaaacgcggttcgcgtttgaagatatagagatccgccagcgcgccaaaccgggcgccaaactcgcgcagacgtacggtccacatatccttcggcgaaggcaccgcatagcactgcgcctgaatccccatatgcagggcgataaacagcgcgcgttcgcaatggaagcgctgggtgataataataaaatcattggtatcgaacactttgcgggtgcgcacgatcgaatcgagggtacggaaaccggcatagtccagcacgatatccgccggatcgacgccggctttaatcagatcgcggcgcatggtcatcggttcgttatagctttgcaaggcgttgtcaccgctcaacagcagataattaaccttaccgctattgtaggcgttgagcgcgccctggatccgataacgataatactgattgatcacgccggtgcgataatatttggcagtgcccaacaccacgcccacctggcggtaggggagatcctgcagctcatcgtaaatatagggcgcggttttccagctcatccagcggtcaagacccagcacggtcaacagcagcaggccgagcaggactaacaggctgtataacacacgctttaacatgaacttgactcaatggtggacgagggaagcttcaggctactttacccgccgggtaagcgcaagaaaccatcgtttaattgcggggattttcagcaatatggcagattaccgaatccaggccggagaagccaaaggcgcatccggcaatctgctcaggctatcaggctaattaacctaacagcacgcggtcgatattctgacagcccaacgctttcagggtcgcgacggtcgcatcccactggataagcgatgcatcggctttctcggccaacagcgcgcgctggatatccggatagtcgtaaccgttaaggctcagcaggttcagcgcgccctgtagcggcggtagcgtcggattgaacgccgcgttttccgcataactgccgcagaaaatggtgccgtctttcagctccagcgccacgccggaaggggagttgctgtacggcgcgtggcagcggttcgccgcctgaatagccgcctgcgtgagcgcatcgccgctgagagggaagccgtgatcctgctcatccatcaacagagttttgatttccaggtctttcgggccaaaggcgtccggcagatagtgctgcagggagtgcgcttcgcgacccggcagatgaatgcgcagcgccagaccgctattcagttcattcataaactggcggcagtggccgcaaggcgtgtagttgacggtaatggcgcgcagggatttttcgccgcgtagccaggcgtggctgatggcgctctgttccgcgtggacggtctgttgcatggtggcgccgaggaattccatgttgccgccgaagtaccagcgaccgctcacgccgcgggcgatagcgccaacgttaaagtgagaaagatcggcgcgggcgcaggcggcagcaagcggcagtagcgcaaaggccagcgcgtcttcatccaaacctgttgcttgttgtagcgtcgctacctgatcggcttcgagcagcgccgggaagtgcgggtctgcgagcatcggggcgatggccgcctgcaggtctgccgccagattagtcaaagcagcttgaaaacgagagtgcatagcgttgcctcataacaatgtaatgggaagctagtgtacgggcccgcacgggacccatatgtgacataagtctcattgtttatgcaacgctaatttgttgcatttataaatgtgatgcaaatcacaattatccgacaacagcgacgatcaccgggaacagaaaaggcgcgaccagcgaggtaataattccgcacagtaccagcgccagcgagctaaacgccccttcctggtagtccagttcggcgcaacgcgcggtgccgagggcgtgcgaggcggtacccatcgacaggccgcgggatgctttggtatgaatacgcatggcgttaagcagcgtatggccgaacaccgcgccgaggatcccaacgaaaatgacgcacacggcgctaatcgctggaataccgccaatactgccgctgaccgccatggcaattggcgtggtgacggattttggcatgatggaagcggcgatttgcggggtggcgcccatcagcagagcgacggtggtaccggtgatcatcgccacgcagctaccgataaagcagatggtgatgatggatttccaacgcgcgcggatctggtgcagttgttcatatagcggaaaggccagcgcaaccaccgccggctgcagcagatcgttaaggattttgctgccggcaaaatagcgttcataagaaataccggtgaccagcaggaaaggaataatgaccaccatggcgaccagcagcgggttgagcagcggaaatttaaaccgcgccgccagcttgcgggcaaggaaaaagacaatcagcgttaacggtagcgaccaccacatttcatggatcattttttacttcctttttgcccgatgattttgcgttcaccgtggaccagatgcgagctccagctcaccaccaaaaagactaataaagtactgacggcgcaggacaccgccaccgggcccagctgcgcgcgcagtaaatcccagtactgcattacgccaacaccgataggcacgaacagcagcgccatgtagcgaatcagaatgttgcagccggggttgacccactgcggcggcataatttgcagcgccagcagcacgaacaaaatcagcatgccgataatgctgccggggatcgtgatgggcagtagcccggcgataaaaatgcctgcatacaagcaggcgtaaatcaggacgaaagctcgcacgtactgccagataatattcagcgacttactcatggtaataacccttgatgaactgccattcatcatacaattaaaccctgaaatgtgctaccgatcacatcatgaattctaggcatcgtcagcatagaaaatgggaacagcggccttattctgcgaggtagtgcagaaaacgagtgagcgccagcgatggtacttcgcttttgcgccagaacaccccaacgctacctttttgttcaatacgcggcaaattcagaatcgtcagctgccgatgttcggcgtaatgctgcgccagccgcaaagaaagaatagagatcatatcgctgctttgcagcaaattgctggtgacattcattgaggctgactcgatagtattctccggcagcatgacgccgttatcgaccagcgcgttatcaatgctctgacgaatgggcgtgccggtaggccagactatccagcgccagacggcgagatccgcccagctcagacgcggcatgctagccagcggatggtcgggacgggcgacgaagcacaccggttcggtatagagcacacgatagttgagcggcagttccagcgcgcggccgccaacacgtccgacgaccacatcgaccacgccggagagcaggtcgtgcagcagcggggtcatcactttttcttcgatattcagatgcagggtcggcatctctttaagcagggcgaggatcgcctgcgccacgcagtctgtcgccacgggagagcagccgatcatcaggctgccgaccagtccaccttgcttaaagcgctcgatctcgtactgcgagcgcgacatatcgttgattagccgctgggcgtgctgaagcagcagtttgccgccttccgaagggcgcaggcccttactgtggcgctcaaagagcggcatgccgacttcttcttcaaattgcgtcagccacttagagagcgcgggctgggtaatattcatcattttcgcgacctgcgtgagattgccttgctcacccagcgccaccagcattttcaaatgctgcagcttcaacttttgcgtccagttcgccatcagccgataacctccaggttatgtctatgcccgaaaagccattgtacatttcatcgccatggttacaaaatcgcaacataaaagaaataaatacaacatctaccctgacctgcactgaggcatcattatggctcaacgacgtgaactacagacgttacttaacgcagcgccggttggcgccctgcagtggcgtgtgattatctgctgttttctggtggtgatgcttgatggatttgacaccgccgccattggctttatcgctcccgatatccgtgttcactggcaattgagcgccagcgacctcgcgccgctgtttggcgccggactattgggattgaccgccggggcgctgctctgcggcccgctttccgaccgtttcggtcgtaaacgggtgattgagttttgcgtggcgctgtttggcctgtttagtctgctctccgcattctcgacgaatctagagatgctggtttttctgcgtttcctcaccggtctgggattaggcggggcgatgcccaacaccatcaccatgacttcggaatatctgcccgcccgccgccgcggcgcgttagttaccctgatgttctgcggcttcacgctcggttcggcgctgggcggcgtggtgagcgcccaactggtggcgcatatcggctggcacggcattctggccttaggcgggatcctgccgctgctgctggccgtcgcgctgctgtgggcgctgccggaatcgccgcgctggcaggttcgtcgcgggctgccgcaggcgaccatcgccagaaccgtcagcgctatcaccggcgagcgctatcccgagacccatttctggctcgacgaaccggcagccgggccgaaaggcagcattagccagctgtttgccggccgacaactagcgatcaccttgatgctctgggtggtgttctttatgagcctgctgattatctatttgctctccagctggatgccgacgctgcttaaccatcgtggtatcgatttacagcacgcttcgtgggtgaccgccgcgtttcaggtgggcggcacgctcggcgcactgttgctcggcatcctgatggaccgtttcaatcccttctttgtgctggcgctaagttattgcctgggcgcgttgtgcatcgtgatgatcggtttaagcgaaaacggtttgtggctgatggcgctggcgattttcggcaccggaattggcgtgagtggttcgcaggtgggcctgaatgcgctgaccgccacgctttacccaacccagagccgcgcgaccggggtcagttggtccaacgccatcggccgctgcggcgccatcgttggttcgctctccggcggcatgatgatggcgatgaatttctctttcgacacgctgttttacgttatagcggtaccggcggcgatcggcgcggtgatgctcatcatgctgatgctggcggttcgccgtcctggatctgtacccgacgcgctgccctctgcgggtgtcgcgaataaataaggagaacaataatgaccctatctactccgcaatcgaaccgcgaacgccagcagttctaccagcatattgccgggcagaatctgaccccgctgtgggaatcgttgcaccatctggtgccgcaaacgccgaatgccaactgcgccccggcgtactggaactatcaggaaattcgcccgctgctgctggaaagcgggcagttaatcggcgctaaagaggcggtgcgtcgggtactggtgctggagaacccgcagctgcgcggccagtcgtccattaccgcgtcgctgtatgccggcctgcagctcatcatgccgggcgaggtggcgccgagccaccgtcacaatcagtcggcgctgcgctttatcgtggaaggccacggcgcgttcaccgccgtcgacggcgagcgcacgccaatgcgccccggcgattttattctgactccgcagtggcgctggcacgatcacggcaatcctggcgatgaaccggtggtctggctcgatggtctcgatttaccgctggtcaactatctcggctgcggatttgctgaagattatccgcaggagcagcagccggtgacgcgtaaagagggcgattacctgccgcgctatgctgccaatatgctgccgctgcgccatcaggtgggaaattcctcgccgatttttaactaccgctacgaccgtagccgcgaggcgctgcacgacctgacccatcttggcgaggctgacgaatgggacggctacaagatgcgctacgtcaacccggtcaccggcggctatccgatgccctcaatgggcgctttcctgcaactgttgccgaaagggttccggtcgcgggtggcgaaaaccaccgatagcaccatctaccacgtagtagaaggtagcggccaggtgacgattggcgaacaaacctttgcattccaggcgaaagacatcttcgtggcgccaacctggcacggcgtatcgttcaacgccagcgaagagtgcgtgttattcagcttctcggaccgtccggtacaggaggccttaggcctgttccgcgaagcgcgttattaataagaaggaaaaccatcatgactcaatacgtttttgctccccaggcgccgattagtatcccggttgttggcagcgatgagcagttcccggtacgccgcgtttactgcgttggccgtaactatgccgcccacgctcgtgaaatgggcttcgatccggatcgcgaaccacctttcttcttttgtaaaccggcggatgcggttgtgccggtggcggctggcgaaacgctggatctgccgtatccggcgcagaccgacaactatcactacgagattgagctggtggtcgccatcggcaaggcgggacgcgacatcccgctggagcaggcgcaggaatatatctggggctatgccaccggactcgatatgacccgccgcgaccgccagatggagatgcgccagatggggcgcccgtgggagataggtaaagcgttcgatctttccgctcctgtcgcgccgctgcataaagccgccgaggcgcgcgaggtgaatcaggccggaatctggctgcaggtgaatggtgaagatcatcagcgtagcgatatacgccacctcatctggtcggtaaatgaaactatcagctatctctcgggcttttttgaactacagcccggcgatctgattttcaccggcacgccggagggcgtcggcgcggtggtaaagggggatgtgattaccggcaacgttgacggactgacgcctatcgccgttcgcgtggtgtgaggtgaacaatgaagctgtacagtttttttaatagctctgcctcatatcgggtgcgcatcgcgctggccctcaagggcatcgattatcagagcgttggggtgaatatccgcatcggggcgcagaatgcgctggagtaccggcggctcaatccggttgggctggtgccgacgcttatcaccgatgacggtgaatcgctgggtcagtcgctggcgattgttgactggcttgaccgccactacccacaaatgccgctgctgccgcaggaggatcccgcgcggatgcgggtgctggagatggtctacgccatcgcctgcgatattcatccgattaataacatgcgggtcttgcgctaccttagcgatgagttgaaggtcagcgaagcggacaaaaaacgctggtatgcccactggatccagcaggggctgagcgcgctggagcaactgctgcgacaatcgaaatccggcgctttctgcatcggtgatagaccaacgctcgccgactgttgtctggtgccgcaatgggccaacgcacagcggatggggtgtgatttgagccattatccgcgctgccaggcggtttacgacgcctgtacccggctaccggcctttattgccgccgcgccggaaaatcaacaagacaaaattccggcctagggaggagggaaaatggcgaaagtgacgcgagcaattatcgttggcggcggcattggcggcgcggcgacggcgctctctctggcgcgccaggggatcaaagtgatgctgctggaaaaggcgcatgaaatcggtgaaatcggcgccggtattcagctggggccgaatgcgttttcagcactggatagcctcggcgtcggcgaagtggcgcgccagcgcgcggtgtttactgaccatatcacgatgatggatgcggtgaatggggaagaggtagtgcgtatcgagaccgggcaggccttccgtgaccatttcggcggcccgtatgcggtgatccatcgggtggacattcacgccaccgtctgggaagccgcgctgacccatcccggcgtggaataccggacttcaactcaggtggtggatatccgccagaccgccgatgacgtgacggtctttgatgacaaaggcaacagctggaccgccgatattctgctgggctgcgacggcgtgaagtcagtggtgcgccagagtctgctcggcgatgcgccgcgggtcaccggccacgtggtgtaccgcgcggtgatcgaggcggccgacatgccggaagacctgcgtattaacgcgccggtactgtgggccgggccgcattgtcatttggtgcattatccgctgcgcggcggcaaacagtacaaccttgtggtcaccttccatagccgcgaaagcgaagagtggggcgtgcgcgacggtagtaaagaagaggtgctctcttactttaaagggattcatccgcgcccgcggcagatgctcgacaagccgacttcctggcgccgctggtccaccgccgaccgcgagccggttgcaaagtggggcaacgatcgcattaccctggttggggatgccgcccatccggtagcgcaatatatggcgcagggcgcctgcatggcgctggaagatgcggtaacgataggtaaagcgctgcagcagtgcgacggcgacgccgctcgcgccttcgcgctgtacgagtcggtgcgtattccgcgtaccgcgcgaattgtctggtcaacccgtgaaatggggcggatttatcacgcggcgggggtcgaacgtcaggtacgtaatcttctctggaagggcaaagcgcaggatgaattttaccgcggtatcgagtggctttacggctggaaagaggataactgcctcgaaccacgctaaggtctggtattgaggtctttcaaccgacgcacagaggcgctaccatagcgcctcttttttttccgggtaacgatatgcgtgtattactggcgccaatggaaggcgtgctcgattcgctggtgcgcgagctgctgaccgaggttaacgattacgatctgtgcatcaccgaatttctgcgcgtggtggaccagctgctgccggtaaaatcgttctatagactgtgcccggaactgcaccatcaaagtcgcactccgtccggcacccgggtgcgcgtgcaattgttggggcaatacccgcaatggctggcggaaaacgccgcccgcgcggtggagcttggctcttggggcgtggatttaaactgcggctgtccatcgaaactggtgaacggcagcggcggcggtgcgacgttattgaaagatcccgagcttatctatcgcggggcgaaagccatgcgcgaagcggttcccgatcacctgccggtgacggtgaaagttcgcctcggctgggacagcggcgaacggcgctttgaaatcgccgacgcggtacagcaggcgggcgccagcgagctggtggtgcatggccgcacgaaagaggatggttacaaagctgaacgtatcaactggcaggccatcggagaaatccgccagcgcctgactattccggtggttgccaacggcgaaatctgggactggcaaagcgcgcaggagtgcatggccgtcaccggctgtgattcagtgatgattggccgcggcgcgctcaacgtgccgaatctcagccgggtaattaaatacaatgaaccgcgtatgccgtggccgcaggtggttgagttactcaaaaaatatacccagctggaaaagcagggggataccggtttatatcacgtggcgcgcattaagcagtggctgggctatttacgcaaagaatacacggaagcgcttggcctctttaatgaaattcgcaccttgcaaacctcagcagagatagcgaacgccattgcacgttattagataaggcggtgttattccgtacgcactttattaattagcactcatccttgcacgatgcgacgcgagctgtatcacgtttttattccttcgcgcttgagtcgccacaagaagttgatacagtgcaatagttggattgctactgcttcggcaggcgaaacctgattacctggcatttgtcgggggtcaggtttttttgtttctggggttcatatgctaatcgccaaagtacttaataataacgtggtggtagtggtcaacgagcagcagcgcgaacaggtggtgatggggcgagggctggcctttcaaaagcgcgtgggcgactcgttggacgaaagtaaaattgaaaaagtcttcgccttacaaagcgatgaactggttggccgcttaggcgaattactcagtcagataccgttagaagtgatgaccacctgcgatcgtatcatcgacctggcccgcgggcggttgggaaagttacaggaaagtttgtacatcacattaactgaccactgtcactttgccatcgagcggcagaaaaacggcgtcgcgattcgcaacgtgctgctatgggagattaaacggctgtatccgaaggagttcgaactgggtcaggaggcgagggccatcatcgcccgccggctgggcgtcgagcttgccgaggatgaagccgggtttatcgctttgcatctggtgacggcgcagctcaacagcgaaatgccggaagtgatgcacgtgacgcgggtgatgcaggagatcctgcaactggtgaagtatcagctgcagcttaactatgacgaagagtcgctcagctaccagcgctttgtgacccacctgaagtttttcgcccagcgcatgttaacgcgaacggtagtgcaggatgacgacgtcacgctgcacagcgcggtgaaagataactacgccaaagcgtggaagtgcgcggaaacggtggcgaagcacttgcaaaagaattatcaacgggcgctgaccaccgaagagattatgtttcttgccattcatattgaacgggtaagaaaagaggggcgttaattcccccacaaaactggattgttactgcatgatgcaggcaaaacctgagcgcgacgccaaccggcgtggttctcgggtttttttatttttaatactcagtcgccggttgtctgtgggcagcggcagtaaggaaaagagcatggaatataaagcactcgcgcaggatattcttcaccgcgtcggcggcaaagagaatattgtgagtctggttcactgcgcgacacgtctgcgtttcaaattgaaggataatgcgaaggccgatgccgaagggctgaaggcgaaccccggtgtgatcatggtggtagaaagcggcggccagtttcaggtggtcatcggtaaccatgttcacgatgtctggctggcagtgcgccagcaggcggggttaagcgacgacagcgaaccggtgccgcaggagaaagcggcgaaaagctcggtattaagtcaactcatcgacatcatctccggcatctttaccccttttattggcgtgatggcggcgacgggtctgctgaaaggtctgctggcgctggcgctaacctgcggatggctcacgccgcagcaggggacctataaaatctggtttgccgccagcgatgcgctgttctttttcttcccgctgtttcttggctacaccgccggcaaaaagtttggcggcaacccgtttatctcaatggtgatcggcggggcattaacccacccgctgatgattcaggcctttgaagccagtcagacgggggcgcccgtggagcacttcctcggtataccggtgacctatatcaattatagctcctcggtgatcccgattatcctcgcctcctgggtctgctgctggctggaacggaagagtaacgcggtgctgccgtccgcgatgaagaacttttttactccggcaatctgcctggcggtggtagtgccgctgacctttctggtgataggcccgctggcgacctggctgagccacatgattgccaatggctatcaggttatctacgtttttgccccatggctggcaggcgcagtgctgggcgcgctatggcaggtatgcgttattttcggcctgcactgggggctgataccgttgatgatcaataacatgaccgtgttggggcatgattctatgctgccaattattctgccggcggtgatagcccaggtgggcgccgtgctggggatactgctggccacgcgcgattcgcgtcagcggatgctggccggttccgcgttttccgctgggctgtttggcatcacggagcctgccatttatggcctgacgctgccgttacgtcgcccgtttatcttcgggtgtatcgccggcgcgattggcggcgcgatcaccgccttcagtaatagctacgcctattcctttggggtgccgaacattttctttccggcgcagatgattccgcccggcggtattgattttagcgtgtggggcggattaatcggcaccggtgtggctttcattctcgcctgcgtattgaccttcttcgccggcatgccgcgcagccaggcagaacagacggtcgtcatcgcgtctgcggcggaaaacgatattctggcgccgatgtccggcagcgtgctggccctcgaccaggtgccggatagcaccttcgccagcggtctgctgggtaaaggcgtggccattattccagcggtgggcaaggtcattgccccgttttctggcgaggtcgcctcgctgtttcagactaaacacgctatcggcctgctgagcgacagcggcattgagctactgatccacgtcggcattgataccgtcaaactcgacggcgtaccgtttaccgcccatgtcaaagagggggataaagttcaggccggcgatttgctgctggagttcgaccgtcaggctattctggacgccggttacgacctggcgaccccgattattatcagcaacagcgatgattaccgtagcgttgagattgtgtccgcgagcgtcgtggatgccggccagccgctgttgtccgtcagccattaattacaggagagagcgatgaaaacattcccacagggctttttatggggcggcgccaccgcggcaaatcaggtcgaaggcgcatatctggaagatggcaaaggtttatccacctccgacgtgcagccgcaaggggtattcggcgacgtcgtggagcgcgtcgcgggcgacagcggtattaaagatgtggcgatcgatttttaccatcgttacccgcaggatatcgcgctgtttgctgagatgggcttcaactgtctgcgggtctcgatcgcctggacgcgtatcttcccgaatggcgatgacgccgagccgaacgaagccgggctggccttctacgacaagctttttgccgagatggccgcgcacaacatcactccgctggtgacgctatcgcactacgagatgccgtgggcgctggtgaaaaactatggcggctggggcagccgcgaggtgattggctttttcgagcgctacgcccggacggtatttagccgctataaaaatcaggtcaaactgtggctcacttttaacgaaattaatatgtcgctgcatgcgccgatgaccggcgtcggcctgccggccggtagcagcaaaggcgaagtttatcaggctatccaccatcagctggtggccagcgcgctggcggtcaaagcctgtcatgaactggtaccgcaagggaagattggcaatatgctgctcggcgggctgatgtatccgctgagctgcaagccggaagatgtctttgaaacgctgcagcaaaaccgcagctggcagttctttggcgacgtgcagtgccgtggcgcctatccgggctacatgcagcgctatttccgcgaaaacgatattacgctgaccatcaccgatggcgaccgggaagcgctgaaagagaccgtcgattttatctcctttagctactatatgaccggctgcgtcaccgccgatgaagcgctgaaccagcaggcgcgcggtaacattctcagcatggtgccgaatccgcatctggcaagctcggagtggggctggcagatagatccgctggggctgcgtaccctgttgaacgtactgtgggaccgctatcaaaagccgttggtttatcgttaaaaatggtctgggggccaaaagataaaaacaaagccgacggcagcatcaacgatgactatcgcatcaggctatctcaacgatcatctggtgcaggcgcgcgaagccattgctgacggcgttgaactgatgggctttaccagttgggggccaatcgatctggttagcgcgtcgaaggccgagatgtccaagcgctacggttttatctatgtcgatcgtgacgatcgcgggcagggaacgcttgaacggcgtaagaagaaaagctttgcctggtatcaggcggtgattgccagcaacggcggtagcctgcaggaataagctgttcggcggcccggttgatccgggccgcatgccgtttaagccggtttaccggcgcgcagtaaaaagatcatcggacgctctttctcttcctccagcgccggttgggcggcgatttgctcggcgctcgggccccattcatcaagctgctccagcacaaaaccggcggcgatgagcgcgttaatccagcttgagagtttgcgatgctgtttaatcaccccctcggcaaaccagttgctgatacgttcgccttcctgctgatagtggctcaccggccagcgtttccgcccctgttcatctacctgccagccctgctgcagcggcgcggtatagatgggatgttcggcggagaagaccagcgtaccgccgggaaccagcgcctgatagagcgtggcgaacagcggggcgacatccggcaggtaatgcagcgccagcgaactgtagaccagatcgcagctctcggcgggcagcgtcagggtttgcaggtcggcgcagcgatattcgatagtttcgccggtggtcatctcccgtgcgcgctccagcatccggttggagagatcgaaaccgattatctgttttgccccctgttgctgcgcccagcggcaaaaccagccgtatccgcagccgagatcgactactcgcaggccgtctaacgctggcagcaggcgctgaattgccggccactccggcgcgccgtcaagccccttcaccgaacgatcaagggtggcgtaaccggcaaagaaaccgggatcgtcataaatgttctgactcattgcaactccaataataactttgtttatttttagctgactcattgtcaatgcacacgctttacttaacgaacgccattcaattaatttatgatgaccaacctttataagtaacccgacctgaagaatgaaccttacactgagcaaaagcgtgctggcggcactgccactggccatcgcgctggctggctgcgcgccatcccataacattggcggccctttaaagcagcaaaccccggtatctcatgtttctatggatcttcccgccgccgtaaaaaatggctggccgcacaccgactggtggaaagactaccacgatgcccagctggataatctgattcagcgcgcgttagccaatgccccggacatgcaaattgccgcgcagcgcatcaaactggccgaagcgcaggcgcgaatgtcgcaggcgaatcttggtccggagatggatttctccgccgatatcgaacggcagaaaatgtccgcggaaggcctgatgggaccgttcgctaccgataccgacggcaacaccgggccctggtacaccaatggtacctttggcctgactgccggttgggatctggatctgtgggggaaaaaccgtgcgttggtgaaagcgcgtatcggcgaagtgaaagcccaggtcgccgagcaggcgcagacccgcgagctgctggccagcagcgtggcgcgcctgtactggcagtggcagaccgaagcagcggtgaaaacggtgctgcagcaggtcaaaagcgaacagaataatattgttagcgtcgataccgcgctctatcagcgtggtatcaccaactctgccgaaggggcggagaacgacattaacgtcagcaaaaccgatcagcagctggccgacgtggcgggtaatatgaaagagattgaagcgcggctgatggcgttaaccaacagccagagccagtcgctcaatctgcgagcggcgccgctgcccgcagtcagcgcgcaaatgccgagcgaactgggttatgaactgctggcccgccgtccggatctgcaggaagctcactggtatattgaatcctcgctgagcgaaattgatgcggcgaaagcggcgttttatccggatatcaacctgatggcgttcctgcaacaggatgcgctgcatttaagcgatctgttccgccattcggcgcagcagatgggcgtcaccgccgggctgacgctgcctatctttgatagcggcaggctgaatgccaatctcgacatcgccagcgcgcagaacggcctgtcgatcgctaaatacaacaaagccgtggtcgatgcggtgaaccaggtagcgaaaaccgcaagccaggtagagacgctgatggagaaaaaccagcagcagcagcaggtggagaaagacgcgcagcgggtggtcaatctcgcccaggcgcggatgaatgcgggaatcttatccggttcccgcgtgagcatggcgaagctgcctgcgctacaggagcgaatcaccgcactgcgtctgcacggccaatggctggatgccagcattcagctgacttccgcactgggcggcggttatcaccagacgacaaaataacggcatcaatagcggcgcgcggcgccgctattgattatcatcctctgtatcttcctcttttcttttcgcttcccggcgtttcagccacagatgaaccccgaccaccagcgccactacgaggatcagccagatccagtgtttaacgtgctgatcgagatggtgcagccacgggccgatcgcttcgccgccaagatagccaagggtagtaaaaatcagcgcccaaacgatggcgccaaaaatattcagcggtagaaatatttttggcggcaagcggctggcgccgatcaagaccgggccgataacccgaaagccgtacataaagcgggtgccgataacgaacagatagggatggcgctgaatcaggcgctgcgctttacggatgcgcgccttttgccgcgagaagcggcgcagtagcttaccgccgaactgacgtccaaggaaatacaacagctgatcgccgatcatgccgcctaaggccacggcgatgaccaccaaaggaaacttcaatagaccctgatgtgccgccacgccgccaaggatggtgatggtttcaccttctgcgatgctgccaataaccagcgccgcgtagccgtattgggaaatcaggtgattgatatccatataaacataaactcctactcttaccagtcccttaatcatacaccctgatgattaaaacgcgctgaagcggatttttatcgctgtacacaaaataatctacagagtgaattatacttggatcagtgctgtacgaagccgtgacaagggggacgctatgaaccatgtctggggactcttcgctcatcctaatcaagagatgagcgtgatcaagagtgaaaatgagaccgtttcgcaccactacacgcaccatgtgctggtgatggcggcggttccggttatctgcgcctttatcggtacgacgcagctcggctggaacttcggcgacggtacggtgattaagctctcgctgatgaccgggttggtattagcggtactgttttacgccgtgatgttagcgggggtggcggtgatggggcgggtgatctggtggatggccagaagctatccgcagcagccgtcgctgaaacgctgtatggtctttgccggctacgtcgcgacgccgctatttttaagcgggatcgtggcgctctatccgctggtatggctgtgcgcgctgataggcaccatcgcgctgttttacaccggttatctgttgtatctgggtattccgaccttcctgagtattaataaggaagaggggctcagcttcgccagctcaaccctggctatcggggtgctggtgctggaagtgctgctggcgatcaccgtcgtgctgtggggctacgggtatcgactcttctaatcaaatgcattgccggcagaaatgaataattatgtcggcaatgcagcatttactcacgattcttattggcctcagggcgttatgacgcggtatgatggcgtttgccagcggcgtagctcactttacgccgcggcgtacgttctataacgtgcaaaaatacttttcagaatgcccatgatgccgaattttcgaatttctttgctcagcctgactttgctgctggctgtgccttttgcgccccaggcgatagcaaaaaccactgcggtaaccgccgcttcacagccggacatcgcttccggtagcgcgatgatcgtcgatctggcgaccaagaaaatcatttacgccagccagcccgatttggtgcgcccgatggcgtctattaccaaagtgatgaccgctatggtagtgctggatgcgcatttaccgctggacgaaatgctgaccgttgatatcagccagacgccggagatgaaaggtatctattcccgcgtacgacttaacagccaaatcagccgccgcaatatgctgctgctggcgctgatgtcttcggaaaaccgtgccgccgccagcctggcgcaccactatcctggcggttataacgcttttatccgcgcgatgaacgccaaagcgcaggcgctgggtatgacccatacacgctatgttgagccgaccggcctgtcggtgcataacgtctccacggcgcgcgatctgactaagctgctgatcgccagcgaacaatatccgctgatcggccagctaagcaccaccaaagaagataccgccacctttgcgcatccggcgtatactttgccgttccgcaataccaaccatctggtgtatcgcgataactggaatattcagctgaccaaaaccggctttaccaacgccgccggccactgcctgattatgcgcacggtgattaatcaacgcccggtggcgctggtggtaatggacgcgtttggcaaatatacccacttcgccgacgccagccggttacggacctggattgaaaccggtaaggtgatgccggttccggcgtccgcattgagctataaaaagcagcgtgaagcgcagatggcggaagcgatgctgaaaggcggcacgcagaccgcgcagaacgattaatttgtccttcccccggattgcgccgcaatccgggaattttgatatcactccggtaacgtccagtcgccatcgccaagctggcgctgcatgattagggtatcgcgccagtcgcccatcttatagccgacgctacgcagctgtccggcaacggtaaagccaaatttcttatggatggcaatcgagccggcgttgttatgtccgtcgccgataatcgccagcatctgccgccacggcccctgttcacattgcgcgatgaggcgcgtcagcagcgcgctgccgatgccgcgcccgcccatgccggactcaacgtaaatcgactcttccagcgtatagcggtacgccgggcgagggcggtaaaaggtggcgtagcagtagccgacaatggtgccgcgccacagcgcgaccagccacggaagcccgttatcgcgcacggttttgattcgcttgcgcatttcgtcgacggtaggcgggatctcttcaaatgaggcgcggccgttaagcacgtgccagacgtacagcgcggcaatcgcatgcgcgtcatcaggcaacgcttcgcggatctctaagtcggcgtcttgtaacttatccttggcggacatgggggctcctcaagctaattggccggagagtctttttctccggcatgcagcgtaatacagaagccccgcggctgaacagtcctggttgacgattattgtgcttgcgtcggcttctgcgtctcgccccagtatttttgtttgctggttttgccgatccccggattcatgctgttggtgggatcgttctggcgatagaagcgttttaaactctccgccgcttcatacagatgcccgacgttgtgctccgccgggtactgcgcgccgcgcgctttcaacagatccagcattttttccttcagttcgtgcgcgtcgacccctttcttcacgatgtaatcctggtggaagacgtgacacataaagtggccatagtagagcttgtagactaactggctgtcgatttccgccggcagatgttcgaaccattcggtgtcattgcggcgcagggcgatgtccagcgccagaatatcttccacttcgtcggcatgtaccgcctgatagcggatcgccgcgccggcggcggcgaagcggtgcaggaatgccttgctgccttcttccgcggtacagacaaagaaatcgccttcggcctgctggaagtactccgtaagccacttttgcgcttcttcaatgccgtcgccggccattttcagcagcagatgatgttcgtacttatcgcgccaggttttcatacgctccggcagatgcgccgggaaagcgtgaccgagcttctgcataaagcggtcggtgaagtgcggcttgaacagggagactttttccagcatcgcgtcggtgcgccccttcatggtgaagaagaacggcattttgtcggtgccgagcttatcgatcatcaggaaagtgtctttgccatatttttcggcgatatcgtaaatatcgcggtgcatatattcaccggccaccggcagattattgaattcagcgaggatgtggcggcggatttcggtgagcacttccggctgattggtgccgatatagaacacctgctggcgcttttccgccggaaaagtatcgagacggacggcgaagaccgccagcttgccggcgcagccggaggattcgaacaggcggtccgggtcggcgttatagcgagccggggtatcggcgttgacgtcgcgcacgcgggtgacgtaatcgtgatcgtgggcgtggcggccatcgtgctgcacgtcggcatcgttgatacggtcatcgtcgaggcggctcaggatttgctccggcgttgaaccaagatcgattcccagatggttgactaatttcagtttgccgtcggcgtcaatctgcgcgaacagcgacatttcggtataggccggtccgcgttgcaccagcgatccgccggagttgttacagataccgccgatgacggatgcgccgatgcaggaagagccgatcaccgagtgcggttcgcggcccagcggttttagcgctttttccagtgaatagagggtggcgccagggtaggccagcacctgctcacccttatccagcaggtgcagcttatccagacgcagcgtgctgataatgacgatttcgcgatcgtaatcattgccgcttggggtggagccttcggtgaggccggtattcgccgcctgcatcaggataattttgtcagcctggacgcaggcgctgagcactcgccataattcaagcagggtaccggggaacaccaccgccagcgcatcgccgtggccggagcggaaacctttccggtaacgctgggttttcgccggatcggttaacagatgcgaggagccaaccagccgcgccagttccgccaaaaagggagggttatttattgttgttgcagatgacatgattcactccttgtgggcacagaaaagctatatcgctgttagcataccgctttgtatgacaatttggtgtatgaatgtttctataaatcagataagaaccttagcattctacgggcgcgttgtttatatatatggcaaactgcggtttttgctgcgttttcgctgggctattagcaccgaatcaaagagggatacataataatgaaatggttgtgtactgttggcgtcgccgtgagcctggcgctgcaacccgcgctggcggatgaactgtttggtaaccatccgctgacgcctgaggcgcgagatgcgtttgttagcgaactgctgaaaaaaatgacggtcgatgaaaaaatcggtcagctgcgcctaatcagcgtcggtccggataacccgaaagaggcgatccgggaaatgatcaaagacggtcaggtaggggcgatttttaataccgtgacccggcctgatatccgcgtgatgcaggatcaggtgatgcagctaagccgcctgaagatcccgctgtttttcgcctacgatgtgctgcacggccagcgtaccgtcttcccgataagcctcggcctggcctcctcttttaatctcgacgcggtgaataccgtcggacgtatctcggcctatgaagcggctgacgatggtctcaatatgacctgggcgccgatggtcgacgtctctcgcgacccgcgctggggccgcgcctccgaaggttttggcgaggatacttacctgaccaccgtgatgggtaaagcgatggtggagtcgatgcagggtaagagcccggcagaccgctattcggtgatgaccagcgttaaacacttcgccgcctacggcgcggttgaaggcggcaaagagtacaacaccgtcgatatgagcccgcagcgcctgttcaacgactatatgccgccgtataaagccggtcttgatgccggcagcggcgcggtgatggtggcgctaaactcgctcaacggtaccccggccacttccgattcctggctgctgaaagacgtcctgcgtgaccagtggggcttcaaaggcatcaccgtttccgaccatggcgccatcaaagagttgattaaacacggtgtcgcctccgacccggaagacgcggtgcgcatcgcgctgaagtccggtatcaacatgagcatgagcgatgagtactacagcaaatatctgccggggctggtgaaatccggtaaggtgacgatggccgaactggatgacgctacccgccacgtgctcaacgtcaagtatgatatggggctgttcaacgatccgtacagccatctggggccgaaagcatccgacccgcaggacaccaacgccgaaagccgtctgcatcgtaaagaggcgcgtgaagtggcgcgagaaagcctggtgctgctgaaaaatcgtctcgatacgctgccgctgaaaaaatccggcacgatcgccgtagtaggcgcgctggcggatagcaagcgcgacatgatgggcagctggtcggcggcgggcgtggccgaccagtcggtcaccgtgctgaccggcatcaaagaagcgctgggcgataaaggcaaagtgatttatgccaaaggtgctaacgttaccgacgataaaggcattgtcgatttccttaacctgtatgagaaagcggtgcaggtcgatccgcgctcgccgcaggagatgatcgatgaagccgtggcggcggcgaaacagtccgacgtggttgttgcggtagtgggtgaagcgcagggcatggcgcatgaggcttccagccggaccgatatcaccctgccgcaaagccaacgcgatctgattagcgcgctgaaagcgaccggtaagccgctggtgctggtgctgatgaacgggcgtccgctggcgctggtgaaagaggatcagcaggcggatgcgctgctggagacctggtttgccggtactgaaggcggccatgcaatcgccgatgtgctgtttggcgattacaacccttccggtaagctgccgatgtccttcccgcgttcggtggggcagatcccgacctactacagccacctgaataccggccgtccgtataatccggaaaaacccaataaatacacctcgcgttattttgatcaagcgaatggcccgttgtatccatttggttatggcctgagcttcaccaccttcagcgtttcggatgttaaaatgtcggcgccaacgatgccgcgcgacggcagcgtgaccgccagcgtgcaggtgaccaacaccggcaagcgcgaaggggcgacggtgatccagctttatttgcaggacgtgaccgcgtcgatgagccggccggtgaaaatgctgcgcggctttaagaaggtgaatctcaagccgggtgagacgcaaaccgtcagcttcccgattgatgttgaagcgctgaaattctggaaccagcagatgaaatacgttgctgaaccgggcaaattcaacgtctttattggggtggattccgcccgcgttaagcagagcgaatttgagttgctgtaatcgatagccctgtcaaaggggataaaccgggtattactcctgaaaggccgattaatcggcctttttttttcgttcgccggccaaatggactacgcttttctcttaagcttctgtaaacggagcgcaaaagaagagaaggaagcaggatgatggcaacgaaatggtcaggcgcgttggcgctagtggcgctggtcagcctgccgctgcaggcggcggaaccggtgaaagtgggctcgaaaatcgatacggaaggggcgctgctcggcaatatcattttgcaggtactggaaagccacggcgtgaaaacggtcaataaagtccagcttggcaccacgccggtggttcgcggagcgattaccgccggtgagctggatatctatccggaatacaccggcaacggggctttcttctttaaagatgaaaatgacccggcgtggaaaaacgccaaacagggctatgaaaaagttaaaaagctggacgcggaaaaaaacaagctgatctggctgaccccagctcccgccaataatacctggactatcgcggtgcgacaggaagtggcggagcaaaatcatcttgcttcattggccgatcttagcgcctatctacagaagggcggcgattttaaactggcggcttccgcggagtttatcgagcgcgccgatgctctcccggcgttcgaaaaagcctatggctttaagctcaatcagaatcagctgttgtcgctggcgggcggcgataccgcggtgaccattaaagcggcggcgcagcaaacctccggcgtaaacgcggcgatggcctatggcaccgatggcccggtagcggctttggggctgcaaaccctgagcgatccaaaaggcgtacagcctatttacgccccgacgccggttgtgcgtgaagcggtgctgaaggcgtatccgcagatggcgcagtggctggaaccggtgtttgccagcctcgatgaaaaaacgttgcagaaattaaacgccagcattgccgttgaagggcgagacgcgaagagcgtagccgccgattacctgcaacaaaaagggctgctgaagtaaatacgagtgactattcgttgttataaccgcgtggcgctgctgctcacgctactgctgttggccgtgacggcgctgccattcgtcacttatgcccctaatcgtctgctttccggtgaagcgcgctggctatggacgcagatgccgtggctggcggcggcgcagctggcgggcgcgctgctgctgttgttattgtgctggatcccaggccgtctggcgctgctcggtagcctgcttattgccgatttgctcctgccactactaatgtggggcgccggagacatcgcgctacagctggtgcaacagggctccccgctggcgcgtacctctcccggaagcggattatggctttcgctggcgctatgtctgctactcgccagcgatactatccgccgcctgactccgcacgctttatggcgttggctactgaatgcgcagctttggctgctaccgtgcctgctgctgtggcatggggcgctcgatcaactctctttgttgaaagaatatgctaaccgtgaggatgtctttaatgacgcgctgcgtcagcacctgtggttgttgttcgggacgttgctgcccggattgttattgggtctatcgataggcttcgccctctggcggcgaccgcactggcaggcgccagtatttaccttccttaatgtgattcaaactattccctcggtggcgctcttcggtttgttgatcgcgccgttggccgggttgacgcgccattttccgctactgggcaaaattggcatttccggaaccggcctggctccggcgctaatcgcactggtgctgtatgcgttattgccgctggtacgcggggtggtgaccgggctgcaacaggtaccgcgcgagacgctggaaagcgcaaccgcaatgggaatgaacgactcccagcgttttcgccaggttcagttaccgttggcgctgccggtcctgttgcgcagcctgcgggtggtcagcgtacagactgtcggtatggcggtggtagcggcgttgataggcgcgggcggcttcggcgctttggtgtttcaggggctcctcagcagcgcgctggatttggtgctgctgggcgtcattccgacgattgcgttggcggtagtcgtggatgccgtgtttgcactgtggagcgcgttactaaaaggagaaacgcatgattgagttcgacggggtgaataaagcctttgccgggcaacccgcggtgaaagatctcaacctgcatctgcgcgagggggcgttttcggtgctgattggtacttccggctccggaaaatcaaccaccttgaagatgattaaccaactggtggaacatgatagcggagtgatacgtttcgccggcgaggatatccgtcgacagccattgctggcgctgcgccgccgtatggggtacgccattcagtcaattggcctgtttccacactggacagtggcgcaaaatatcgccaccgtgccgcagttgcaaaagtggccgcgcgcaaaaattaccgagcgggttgatgaattgatggcgttattaggcctggagcctctactacgcgatcgctacccgcatcagctttccgggggccagcagcagcgcgtcggcgtggcgcgggcgctggcggccaacccggaggttctgttaatggatgagccgttcggcgcgctggatccggtgacccgcgaagcgctgcagcaggagatgctgcgcattcatcgtctgtttgggcgcacgattgtgctcgtcacccatgatatcgatgaagcgctacgcctggcggatcatctggtgctgatggacggcggcgaagtggtgcagcagggagagccgttacagatgttgctggagccaaagaacgcctttgtcgaaaccttctttggccgcagtgaactaggggtgcggctgctctcgctacgcggcgtcggggattatctacgccgggatgagcggctggcgggcgatgcgctaaacgtctcaatgacgttgcgcgaggcgttgtcgcagtttgtcgctcatcgtcgcgacgttttgccggtggttgatgaacagggcgaagcgtgcggtacgttgcactttgctgatttgttacgtgagggaggtggggcgtgaaggcgcttcgcgatccgctgctgtggttggtggcgctgtttatcgcgctgctgctggtgttgccccatagcgcgccgctgtttagctggctatttccggaactgccgcgcccggtttatcagcaggagagttttctggcgctgacgctggcgcatttttggctggtggcgttatcaagccttgtcgcaacggttatcggtatcggggccggggttatcgtcacccggcccgccggacgagagtttcgtccactggtggagaccattgccgccatgggacagacatttccgccggtggcggtactggcgattgcggtaccggtgatgggcttcggctggcaaccggcgcttatcgcgctggcgctgtacggaatattgcccgtgctgcaggggacgttggctggattaagttcgatatcgcctggggtattgaacattgccgaggggatggggatgagcggctggcagcggttgtgcaaagtggagctgccgctggcggccccggtcatgctggccgggatccgcacttcggtcatcgtcaatattggtacggcaaccattgcctcaacggtgggcgccaacacgctcggcacgccaattattatcggcctcagcggctttaataccgcttacgtgctgcagggggcgctgctggtagcgctggcggcgatcatcatcgatcgctttttcgaacggctaaaccagtgggtcagccgacaccaccgcgaacaataaacgagtaacccgctagcatcacgccgccgatcccgccgatggccatgcataagaagagggtaatgaccgcgattttcgcaggcttcatgataggctccttttgttaacggagggattatacggtgaagcgctggtgttaacgaaacattaattgctatttagccagatcaggttttcccgctgttcccaatcgcgaagctgtgctgcctgtggactacctggcggtgtggggcaccacaccagtagggtgctgtcgggaaacagttgcggacggatctggttcagggaatgtgcgacaacgtcgacccgccaaccttgctcgcaggctttccagccctccagccacagtcgggtggtgtcatcggtattccagccaaccaccaccgcgtgatggccggggcgtttccaggcatgggcgagacattgggcgatatgattgatcaagatgccgtcgagcaggctgcgcagcgccagtagcgttggctgcgggcttaacaggcggtggcggagcggattaatcaggtaatggaccagcgtttgcgcggaatagctgtggctgcgctcttttagccataggcgcaagcgttggtaatgaccttcctgtagaaaaccgagcaatatctcctgctgttcgcgccagccgtcttcagcatcctcttcgcggtcaggtagcaggttttttaccttgctgacctgtacgccggcatcaatccagcgcttaatttcgcgaatacgctcaatttcattgtcattgaataatcgatgaccgccatcggtgcgctgcggtttaataagttcataacgtcgctgccaggctcgcagcgtcacgggattgatatcacaaagctgagccacttcgcctatcgtatacagcgccattttcccctcccgccgtgttctcctgatttaactgtagaaggggtttatcaattgttcattttttgcgctttctggcgctaatgagacgatgggaagtgtgatcgtcaccatgatttatcattttcttgtatcgcttcaaagaaagttataggcggtcagtgtatgttacgcgctttcaaaggttgtgtggtttgcgggtatgtacgagttcgatctggtattgctgctgctccagcagatgtgcgtgtttctggtcatcgcctggctgatgagtaaaacgcggctgttcattcccctgatgcaggtcaccgtgcgtttgccgcataaattgctgtgctatgtcaccttctcgattttttgcattatggggacctatttcggtctgcatatcgaagattctattgcaaatacccgcgctattggcgcagtgatgggcggcctgctcggcggtccggtggtcggcgggttggtcggcctgaccgggggcttgcatcgttattcgctgggcggaatgacggcgttaagctgtatggtgtcgaccattgtcgaagggctgctcggtggtctggtgcacagcattctaatcaggcgcggccgcccggataaagtgttcagcccgcttaccgccggggcgattacctttttcgctgaactggtacagatgctgataatcctgctcattgcgcgaccctttcaggatgcgctgcacctggtacagagtattgccgcgccgatgatggttaccaataccgtcggcgccgcgctatttatgcgtatcctgctggataagcgggcgatgtttgaaaaatacacgtcggctttttccgccaccgcgctgaaagtggcggcctctaccgaggggatcctgcgtcagggattcaacgaagagaatagtatgaaggtggctcaggtgctgattcaggaactggatatcggtgctgtagccattaccgaccgcgagcggctgctggcgtttaccggcatcggcgatgaccaccatctaccaggtaagccgatctcatcatcctatacgcaaagggcgattgataccggcgaagtggtttatgccgacggcaacgaggtgccgtaccgctgttcaattcaccctggatgcaaactgggctcgacgctggtcattccgctgcgcggtgagaatcaacgggttattggcaccattaagctatatgaagcgaaaaaccgcttgttcagctcgattaaccgtacgctgggggaggggatcgcccagctactgtcggcgcagatccttgccgggcagtatgaacggcagaaggcgttgctgacccagtcggaaattaaactgctgcacgcgcaggttaacccgcactttctgttcaacgccctgaacacgctgaaggcagtgattcgccgcgatagcgatcaggccggacaactggtgcagtatctatcaaccttctttcgcaaaaatctgaagcgaccaacggagatcgtcaccctggcggacgaaattgaacatgtgaatgcctatctgcaaattgagaaggcgcgattccaggataatttacagatacgtatgcaggttcctgcatcgcttgaacatctgcagctaccggcgtttacgttacagccgatagtcgaaaacgcgatcaagcacggcacttctcagcatcttggcgtaggcgaaattaccattcgcgccagtcagcatgagcgttggttacagctggatgtggaagataacgccgggctgtatcgggataaccctaatgccagcgggctcggaatgagcctggtggacagaagactgcgtacgcgcttcggcgccgactgcggaattagcgtcgcttgcgaagcggaacattttacccgcattacgctgcgactgcctctggaggagaatgcatgctaaaagttttaatcgtcgatgatgagccgctggcgcgggaaaatctgcgcattctgctggaggcgcaaagcgatattgatatcgtcggcgaatgcggcaacgccgtcgaggcgattggcgcggtgcataagctgcgtcccgacgtgctgtttctggacattcaaatgccgcgcatcagtgggttggagatggttggtatgctcgatccagagcatcgcccttatatcgtctttttaaccgccttcgatgaatatgcggtgaaggcctttgaagagcacgcctttgattatctgctcaagccgatcgaaaacgcccggctggagaaaaccctgagccgcctgcgccaggagcgcagcctgcaggatgtatccctgttggatgatgcccggcaggcgctgaagtacattccctgcaccggtcacagccgcatctggttgctgcagatggaagatgtggcttttgtgagtagccggatgagcgggatttacgtcaccgatagcgaaggcaaagaagggtttaccgaactgactttgcgtacgctggaaagccgtacgccgctgttgcgctgccaccgtcaatatctcgttaacatggcgcatttgaaggagatccgccttgaggagaatgggcaggcggaattgttaatgcgcgccgggcaaacggtgccggtcagccgccgctatctgaaaagcctgaaggaggcgattgggctgtaaaaacgcggaatcatggtagacttagcgccagcatttttcatcatgaaggcattatgatcagtaacgatattttacgtagcctgcgctacaccctgaaaacgaataataacggtctggtacgcatctttgcgctggcggatgcgccggtgagtgcggaacaactggtaccctggctgaaaaaagaagacgaagaagggtttgtgcgctgcccggatatcgtgctgtcgaatttcctcaatggcctgatttacgacaaacgcggcaaagatgagtcggcgccgccgctggcggtcgagcgccgggtgaataacaatatcgtactgaaaaaattgcgtatcgccttctcattgaagaccgacgacattctggcaatcctgactcagcaaaaattccgcgtgtcgatgccggaaatcaccgccatgatgcgcgcgccggaccacaaaaactaccgcgaatgcggcgatcagtttttgcgctatttcctgcgcggtcttaccgaacgcgagcacgccaaaggctaagcgcctgacttgacccgggcctgcgcccgggccctgcacctctttacttcttcacctctttaaaaccctgcgattccagcaatttagttgacacagatagtgaaacaaactgttgtgagcagtcggtgaacatcgagcccggcagtttgcacagctcgctgattttcgctttgctaaaatccacggtcagatgctcaagcgcataggaatctttatagtcgatggtctgttctacgccctgtagattacgatacacgctgctaatcggctcaataatggcccgcgcctgttctttattttcggcgccgatcgatttatagggaatggtgttgtcggcatcctgacgcaatactttgtcgccgtcatagtggtaggtaaagctgagttcgacgccgttggtattcagcgcaaaggttttactctcttcttttttattatcgcagccggcgagggccgccagcagaacagatacggccagcacgccagccatcttgcggttaaatttcatcacgattccctatgttgagtggtattgcgcgtccagagaggagcagacagtaatgattattatggctattgcgcgttgtcgcaacagaaggcgtgaagggaataaaaaagcgctgccggagcagcgcttttacggaggttatttaacctgctgacccggctgtgcgccgctgtcagggcttaacaggaagatatctttcccgccagggccggcggccatcaccatcccttcggagatgccgaagcgcattttacgcggcgccaggttggcgaccatcactgtcaggcggccaatgagcgcctgcgggtccgggtaggcggagcggatgccggagaagacgttacgcttctcgccgccgagatcgagagtcaggcgcagcagcttatcggaaccgtcgacgaactcggcgttttcaatcagcgcgatacgcatatccaccttggcgaaatcgtcaaaggcgatagtttcctggatcggatcatcggccagcgggccagtcaccggcgcggcggcggctttcacttcttctttagaggcttccaccagcgcttcgacctgtttcatctcaatgcggttgtacagcgctttgaaggcgttaaccttgtgcgccagcagcggctgctggatggcgtcccagctcagctcggtgttgaggaatgcttcagcgcgcgcgctcagccccggcagaaccggcttcagccaggtcatcagcacgcggaacatgttcagccccatggtgcagattgcctgcagatcggcgtcgcggccttcctgttttgccaccacccacggcgcctgctcgtcaacatagcggttagcgacgtcggccagcgccataatttcgcggatggctttaccgaactcgcggctttcccacgcttcgccgatagcggcagccgcatcggtgaaggttttatacagcgccgggtcagccagttcggcggagagcatcccgtcgaagcgcttattgataaagccggcgttacgcgaagccaggttcaccactttgttaacgatatcggcgttaacgcgctggataaagtcttccaggttcaggtcgatatcatcaatgcgcgaagagagcttagcggtgtagtagtagcgcaggctgtcggcgtcgaaatggttcagccaggtgctggccttgataaaggtaccgcgtgatttggacatcttggcgccgtttaccgtgacatagccgtgaacgaacaggttggtcggcttacggaaattgctgccttccagcatggccggccagaacaggctgtggaagtacacgatatctttaccgatgaagtgatacagctcggcactggaatctttcttccagtattcatcgaagctggtggtgtcgccgcgtttgtcgcacagattcttaaaggaacccatgtaaccgatcggcgcatccagccagacgtagaagtatttgcccggcgcgttgggaatttcaaagccaaagtacggcgcgtcacgggaaatatcccactgttgcaggccggattcgaaccactcctgcattttgttcgccacctgctcctgcagcgcgccgctgcgggtccacgcctgcagcatttcgctaaaggacggcaggtcgaagaagaagtgctcagattcacgcatcaccggcgtcgcgccggatactacagatttcggatcgatgagctcagttgggctgtaggtggcgccgcagacttcgcagttatcgccgtactggtccggagatttacacttcggacaggtgcctttgacgaagcggtccggcaggaacatgcccttttccggatcgtagagctgagagatggtgcggtttttaataaaaccgttttctttcagacgggtatagataagctccgacagctcgcggttctcgtcgctgtgcgtcgagtgatagttgtcgtagctgatatcgaaaccggcaaaatcggtctgatgctcctgactcatctcgccaatcatctgctccggggtgatgccaagctgctgcgctttcagcataatcggggtgccgtgggcgtcgtcggcgcagatgaagttgacttcgtggccgcgcattcgctggtaacggacccagacatcagcctggatgtgctccagcatgtggccgaggtggatagagccgttggcgtacggcagcgcgcacgttaccagaatttttttcgcgacttgagtcatagtgggcattacatcttctgttgtaaaaagggcttttgatgttacctgaaaggcaataatttggtaagcccaaagcttattgtgggggaattattccctttcaggtaaacttaacggacaagaatcaactcacaataacaaaggagtcgggatgagttcgcaatcccaggccaaatcccccgaacgtctacgcgcgatggtcgccgggactctggctaatttccagcacccaaccttgaaacataacctcaccacgctaaaggcgctgcaccatgtcgcctggcttgacgataccgtgcatatcgagatccaaatgccgttcgtctggacccgcgcgtttgaggcgttgaaggagcaatgcagcgccgagctgctgcgtatcaccggcgcgaaagccatcgactggaagctctctcacagtatcgccaccctgaagcgggtgaaaaaccagccgggtattaatggcgtgaaaaacatcatcgccgtcagttccggtaaaggcggggtgggcaaatcctctaccgccgtcaacctcgcgctggcgctggcggcggaaggggccaaagtgggtatccttgatgccgacatctatggtccgtcgattccgaccatgcttggcgcggaagacagccgcccgacatcaccggatggcacccatatggcgccgattatgaagtatggcctggcgacgaactccatcggatatctggtgaccgatgacaacgccatggtgtggcgcggcccgatggccagcaaggcgctgatgcagatgctgcaggagacgctgtggccggatctggattacctggtgctggatatgccgccgggaactggcgacatccagctgaccctggcgcagaacattccggtaaccggcgcggtggtggtgacgacgccgcaggacatcgcgctgatcgacgccaaaaaaggcatcgtgatgtttgagaaagtagaagtgccggtcgttgggatcgtggaaaacatgagcatgcatatctgcagcaactgtggccaccacgagcctatcttcggcaccggcggcgccgagaagctggcggcgaagtaccacactcagttgctaggccagttgccattgcatatcacgctgcgtgaagatctggataaaggcacgccgacggttattgcgcgtccggaaagcgagtttaccgatatctaccgccagctggcgggacgcgtggcggcgcagatgtactggcagggcgaggttatcccgagcgagattgccttccgcgccgtttaaggctgggtgtaacgcatcagccaataatctccgtcaggagacgcgccctgtgcttcgagtttccagccgtgatgctggtagaagcgcagggcgttttcatttcgagacagacacttcagcgtaccactgcgcttgaatgagcgctgaacctgttccagcagcaggctaccgacgcctttcccctgccactgcggatccacaaacaggttatgcaggaagttgtcgataacccacaccgaggcgaatcctgccagcacatcgccgcattcggcgacccatagctgtgcgtcttgcaccacggcatcaaaatcttccagccgccattgatcgccgttaagccatgtccatgaggcaagacgcgcgtcaagaaacagctgacgcaggcgagggtagtcgctggcgcgaccggggcgaatgcgcaattgcgcctgcgtcgaggacttagcgatgatagaagatctcgccgtcatacactttcaggatcttgccttcggtgtcggtgatcagaacgtagttgccgcccatataggtccagtgactgccggcatccggcgcgggcaggttacgcaattgccactgtttgatgttgtactctggagtgaggtacatcgccggcacggtatcgccaatatgaaattgggtaaaatcagcggtgaattctttcatcgcatactgttcaatcccggaggccggcgccgcccagcttgcgctggcgctggcaagaagtacgcccagaagcatcatttttgttttacgcatattttcctcaatattacctggactcaaaatagcagcctcgtatcattcctgaagcgctgctgaaatggcaagcactggttttttaaaaagtgtaagcaaaacacggctgaagtcttgtcccgcttgcgttgttaggcggtaaatcgctattttgggagcattctgaagcaggggagacttggcatgttcaggctggaagatctgaccttatttgtccgcgcggcggcgttaggcagttttagcgaggcggcgcgggaggcggggcagcagccagcgcaggtcagcgcggcgatcaaacgcctggaaacgacgctcaacattcgcctttttgctcgttcgacccgtagcctgcgcctgaccccggagggcgaaacctggctgccctacgccacccagatgcttgataccctacaggccgggttacagaaaattcaggcgccgggggatgaagtccgcggcacgctgcaaatcgccgtgccatccgatcttggacgtaacctgctgctcaaggtgttttgcgcttttcgcgaacgtcacccggcgttgcgcctgcggctgcacttttccgatcatctgaccgacgtgtttaaagatccggtggatgtcgcttttcgctacggctaccacgaagacgcttcgtttatctcgctgcccgtcgcgccggaaaaccgtcgggtgttggtggcttcaccgcagtgggttgcccgccacggtcaaatcagtagtctggaggagttatcccggcacagcgcgctgttgtacgtattacgcggccgcccttttgaccgctggccgctgatttcaggtaatgaagtgcataccgtggagatgaacggcgcgattatgagcgatgatgcggaggtgatccgtcggctggcggtagccggggaggggatcgcttataaatcgtttcttgatgtcagcgacgacctgcgggaagggcgtctggtgcggttgctgccggactttcagggcgatttaacgccgctgaacatgatttgtccgcaccgcaaacagctctctgccgcggtgcgtttgttatatcaagaggtgaaatcacattgtgaagcgcttagtgcttaactaaggtcgcgaagtaatagattagcgggatcgccagcacccacaggccaatcggaatttcacgccacttgccggcgatcgctttgatgacaatgtaaaacagcagtccgccggcaataccggtgccgaagctgttggcgattagcgtaatcatcaccatcattaacaccggcagtccgtcggtaaagttccccagatcgactttgcgcaggccgctaaacatgttcaggcctatcaaaattaacgccggcgcggtggcctctttagggatcatgagcgccaccggcgtaaacagcaacatcagcaggaacatcaccgccgccgccagcgcggtgaggccggtcttgccgccggcttccgctgccgcggatgattcaatcagcgccgtagccgccggaataccgacccacgggcccagcgcggcggcaatcgaatcgaccataaacgggcgattaatctgcggcatgttgccttcttcatccagtaagcccgcctcgccgccgaccgccagggtcgtacccatggtcgagaaaaactcggacgcgaaaaagacgaacaggaacggcaggaaggcgatatttaatgcccccaacagatcgatttgcccgaacaccggagccagcgagtgaggaacatcaataaagctgtccggtagctttgtcacgccgaatggaatacccaccagggtggcgaaaagaatagcccacaatatcgcgcctggcactttacgcgcctgtagcgctattgccagaaacaggccgcacagcgccaccagcgcgccgggggcaagaaaatcaccgagcatcagggcgttggttttggcattcgccagcaccagcccggcattgcgaaagccgagaaccgcgacgaataacccgatcgaggccgtcagccccagcttaattgattgcggtaccgagcgggtgaccacttcgcgcaggccgaattgggtcaacaggaagaagaggatccccgaccagcaggcaatcccgaggccaatctgccagccgataccttcgctgcccgccagcgtcacccccaccagtaccgagccgccaatgcccggaccgacgataaacggcaggttggcataaaacgccattaataacgaaccagcgacaaagaccaggatggtgccggtggtggcggcgcctttatccattccgccaatcgccagcagccctggaatgaccaccagtaaataggcggcggcgagaaagccggtgatcccggccaggcattcggtgcgtagcgaaccgccccgtgagtgcagcgcaaagcggcgctccagccagtggctacgggcagaagtatgaagtgtgttatcggccatgctcaggctccctgaggattattgttgtgatgagttggcgccggagtctcccggcaggctatcaacgggtcaactatctggcgactgccgccgtcggtgagacccaaatcggttagatgcggcccggcattacaggcgaggcaggtgccttcaatcgctttaaatacccggtatggcggctcccagtcggcgactttactgcttaaatctcgcagctcgcggaactgccgcgccagctcggcggcgggaagatcggagagcatgccggcaatcggcatcgccacatgggccaggagctcgccctgttgcgccagcgccattccgccgccggaagcgatcaactgatttgccgccagcgccatatcattcgcatcacgcccgagcaccaccaggttatgtgagtcatgcgagtagctggtggcaatggcgccacgcagctcgccccagccttcgagcagggcgatttgcggcgttgcctgatggcggccatggcggtgtttcacccaaatcaggctaaagcccgcgggcagttgtacttcgccgtcgcggatctgtacttctacttcaccccatttcgtgaagcgcgcgccgctgatgtggcgcaggcgggcgacgccatggcgaatgctcttaattcgcagaacaaaatcttctgcatcgaggggggctaactgcaaggtatcacgcggcggcgtcacgccgggcgcggcggcaaggggggttagcaggtgaccgttacgagcgataagtttgccgccgacatagacctcctgagcctcgagtttctccagcgaatcaaacaccaccagatccgcgcgccgtcctgcggcaatcagcccaagatcgttacgctgcaggcgaatagccgcattgagggtggcgaaacgcagcacatcgaccgttggcaaaccgtgtgcaatcagcaggttgagcagggcgataacgccgcctttctccagcagcatatccggcggtacgtcatcggtgcagacggtgatttgcgaggagagatgcggcagcgtttttaacgccgcaacgatgtcgggcagcaggtaggggtgcgagccgcgaatttcgatagtcagcccggcgcgcagtttttccagcgcatcggccgctgaagtcagttcgtgatcggaggtgacgccggcggcgagatacgcctgtaaatcggcgccgctgagcccacgggcatggccctcaatcagtttgccgctgttaagcccggcctggacaatctcctgcatccgttcgctgccgttcagcacgccatgcatgtccatcacttccgccacgccgcgtacttccggccagccgagcatggtttccatttcagcgccggtgaaatcagcgccggacatttcgagacctggcgtagaggggacgctggatggcgcggccaccatcacctgtagcggcaggtggcggctggcatcaaccgcgtagcgcacgccatcgacgccgagcacgttggccagttcatgtgggtcccagaacaccgcggtggtaccctgcgtcaggacgatttcggcgtagcgctcgggcggtagatgcgaactttcaaggtgtacgtgggtgtccatcaagccaggcgacagatagccgccctgcagcgagcgcacttcatgggcgtcggtgcggctgccgcgcggatgcacgctggcaatcatttccccaacgatgccgacgtcagcgtcgcggatttcgccagtggccatatcgacgatctgcgcatcgacgagcaacagatcaaacggggattcgccgcgtgcggcctgcacggcgcgacgacggacttcagcattgctggacataacaactccaccacaaggataatgcggatactctatgggcacagcaaacgtttgcccagatgaataaatttatcgcccgataagctcgggttattctgtatgaccattggtagcgaacctgacaatgaacgaaccctggcaacgtctgcccgcgctctcactgaaacaactgcagtattttgtgaccctggctcagttgcgccattttaccgataccgccaatcggctggcgattagccaaccggcgctcagcagtgcgctacggcagattgaaagtgtgatcggtggcaagctggtcaatcgtaccgcctcggcggtgactctgacggaactgggggcggcgattttaccccatgcccagcggatactgagcgtggcccaggcttctttttttgatatgcagcagatcgtggaagcgggcggcgatggtacggtgcgtatcgggctggtgccatcggtgagctcgctgctgtttccgctgctgccgcaaaccctggcgcaggcctttccgcgtctgcgcatcgaatttcatgaccagaccaacgatgcgttaatgcgggcgctgcaaagcggtgagattgattttggtatcggcgcgatcgacagttcgctaccagctgagctactggtttatccgctacgcgaggatccgttcgtggtggtactgcaccgcgacgatccgctcgctgcgcagccaaatttaccgtggaagcagttggtaggccgtgatattgccgttttctcaaaggggaatattcagcggctggtggcggcgctggtggaaagccagcgtttgaccttaacgacgcgttaccaggtagactatatcgaaaccctttatgggctggtacgttcgcggctggcggtggccattctcccggcgctgtatacgacctatttgcacgatccggcgttaaaggtggcgcaactgcagcagccggcgctcacgcggacggtggccctgatgcgtgggccgcaggcgcttgcaccgttaatcgaagagtgtttttctctgttacagtccgcattgcgctagggcaggtgttttatcagtacgtccaccgtcaaatggttgatgtactccagcgagtgcgaggacagcacccccagcagccggttatggtgtccggcgataattaaatcgatatggcgttgttgtacgcactcttcgacatcagcaaaacggcgggtcgtcaccagcgatagcgtctgtaccggcagggcgacggtcgtcgccagctcgttgagcagggctttggcctgaatgacctcttgcgatacttcatcattctgcaggctgtcggacacgtaattaagcgcccggtagtcggtgctgatgtgggcgatggtaatccgcatcccgttttcctgcgccatcctggcggcgtgttgtagcaacggaacaccatcaaggctgctattaatcagtaccagcgcatggtgataaacggtcatatatacctccgcgcaataaaacagtcctgaactcattttgggcctgcggcgaggggaacgcaaatcagaacatgcgaggcgaatggataaaaaaatcccccgcggccagaaagggcgcgagggagattcagcgattatcgcttacggggtgacaatgttgaaccagaattcaaatttgtccatgtagctcagcatttcatcgagcttagcgccattgccgctaatcttgacgtcgcccttatcttcagcctgcttcagcgtttcctgtttcaaaatgatcttgttcagggtatcgcggttcagagtaatactggcgtcagcgttgtctgctaccgcattagcggtgtggttaagcacgccattttccagctccagcttgtacttaccgccatctttaccaagatcgatgttgaagaccgcttttgccgcgccggctttctggccgttgatatgtacgcccaggtagtcgaagaacatctccggagtcattgcacgaacggtatccgggctggcggtgttaggcgtcgggagcttctgtacgccgttacgcagttcctgcgcgccggtcaggtagaagttgcgccaggtaccggcttccgcctggtagcctaactgctccagggcatccgcttcgaggttacgcgcatcggcattctgcgggtcggcgaagacgattttactggtcacctgcgccacccagcggtagttcccctgctgatagtcggctttggctttctgcatgatggcatcggcgccgcccatgtattcaacgaacttcttcgcagcctgttgcggcggcagctcgtcgagggtcgccgggttgccatcgaaccagccgaggtagtaaacgtacgtcgctttcacatcgtggctgacggagccgtaataaccgcggctcgaccactgtttttccagcgattccggtagcttgaagttagcggcgatttcatcgcgggtcaggccttcgttggccatacgcagggtctggtcgttgatgtagcgatacatgtcgcgctgacctttcatcagcttgataatgttgtcattaccccaggttggccagtggtgctgagcgataatgacttcagcatcgttgccccagcggtcgatagcggcgttaatatattttgaccaggccagcggatcgcggatcttcgcgccgcgtagcgagtaagtgttgtgcagggtatgggtaacatcctctgccgcttcaatcattttcttctctttgacataccacagcatttccgacggtgcttcggaacctggtgccatcatgaagtcgtaggtcaggccatcaatcacttcctgctggccggttttagtgatgtagttggtcggctggagcagcgtcacggtacccgcagaggtggtggtgccaagaccagcgccgacctggcctttggcgtcaggcttcagcaggttgccgtacatatagctggcgcgacgactcatcgcggtaccggccataatgttctcggaaaccgcttcttccatgaatccggccggggcgtagatttttactttgccagccttcacgtcggcttcatcaaccacgccgcggatgccgccgtagtggtcaacatggctgtgggtgaacaggacggcgacaaccggctttttaccgcggttggcgtagtagagatccatcgcttctttcgccggctcggcgctcagcagcgggtcgataacggtgatccctttctcgccttcgatgatggtcatgttggagagatcgagattacggatctgataaacaccgtcggtgactttaaacaggccgccgatattaatcagctgtgactggcgccacaggctcgggttaacggtatccggggctttttcaccttctttgacgaagtcatattttgccgggttccagataacgttgccttgctcgcctttaatcatggtctgcggcagcgcggcgataaaacctttatgcgcgttatcgaaatcagttttatcggcaaacggcagtttgttgtacagcgcgttatttgcctgctgagttgccggggtggcgtcctgctgctgggcggcagcgaaggcggaaagcgacagcgaagttaaaacaccggccagagccagatgtttagcgatctgatttaatttcattgcatggcctcttagattatttgttccgctatcaatgtttaatatcagcggataattcaaatgcggactaattactggccattttaaagcgaatactttgcgttgatagtcccatatgggactggtcattatcaaagaaataatcaccctcgaatctgctatcacttcgctgctatactcgataccacagcagactgcgcagcaaggggcatagcgtgaattttcaggatatccatagctattatcagcaactcaacattgatgccttttttccgcaaataattgcgcaaggggaagccctgacggttgcggctaataaaaaattagcaattcagccaggatatatttatttttgcactgaaggttcgctgtcaatattaatgccggatagtggccttcatattggtaattccattgagtatatgccgatagggcttatggaaaggtactgcccgctggcgaagtttgaatatatcggtagcgcagcggtgaagctggttaaagtcacttatgatgtctttgaccaaatctttttacacggcggccctgaacgcgtgcaggagctggcgaccattctgacctatatgtcgatctttactatcgatcttcataacgaacgccgacagatgaccagctatcagaccatcaggccgatgctgtttcgttatctttatcgccagagtacccatcagggggaaaacgaaggcctggcgctgtttattattaagcgtactaatctgtcgcgcacgcatgtttttcgggtgctggcggatctgaaagccgggggctatatcacgatgaagcgcggcaaactggtttctatcgaccgaccattgccggaagcctactagcagagagggaaaactcccgcgaccgggcgccgcgggagcaggacattatggcgtaacgatgtcgaaccagaattcgaacttgtccatatagcccagcatttcattgagcttatcggcgttaccggtgattttcgcatcgccgttatcaacggcctgcttcagcgtctcctctttgaggatgatcttattcagggtggcgcggttgagggcgatagtggtatcggcatctttcgcttccgcattagcggtatggttcagtacgccgttttccagctccagcttatacttgccgccgtcgctgccgagatcgatattaaagaccgatttcgcgttacccgctttctcgccgttgatgtgcaccgccagatagtcgaagaacatttctggtgtcattgcgcgcacggtatccgggctggcggtgttcggggtaggacctttcaccacgccgttacgcagttcctgcgcgccggtgaggtagaaattacgccacgggccggattccgcctggtagcctaactgttcaagggcatcggcttccagattacgcgcatcctggtttttcggatcggcgaagacgattttgctgaccacctgggctacccagcggtagttaccctggtcataatcctctttcgctttcttcatgatggcatcggcgccgcccatgtaatcgacgaatttcttcgccgcttcttccggcggcagttcgtcgagggtggccgggttgccgtcgaaccagccgagatacagcacgtaggtggctttcacgtcgtggctaacagagccgtagtaaccgcggttagcccaggtgttggcaaggctatccggcagtttgaatttggcggcaatttcatcgcgagtcagcccttcgttagccatacgcagggtctggtcgttaatgtaacggtacaggtcacgctggctcttaagcaggttgaccacgttttcgttgccccaggtcggccagtggtgctgagccataataatctcagccttgtcgccccagcgtacaatcgcttcgttgatgtacttcgaccacggcagcggttcgcggattttcgcgccgcgcagcgaataggtgttgtgcagggtgtgtgttacgtcttccgcggattcaatcagttttttctcttcgatgaaccacagcatttccgatggcgcttctgaacctggcgccagcataaagtcataggtcagaccgtcaataacttctttctgaccgtctttttcaatgatattagttggggcaatcagggtaacggtacccgccgaggtggtggtgcccagaccggcgccgacctgtccggtggccgatggtttcagcaggttgccgtacatgtagctggcgcggcggctcataacgttaccggccatgatgttttcagccaccgccgcttccataaagccggacggcgcgtaaattttcactttgccggatttcacatccgcttcatctactacgccgcgcaccccgccgtagtggtcaacgtggctgtgggtatagataacggcgacgaccggtttcttaccgcggtttttataatacagatccatgcccactttggcggtttctgccgacaccagcggatccacgacggtaatgccttctttaccttcgatgatggtcatgttggaaagatccagattgcggatctggtagacgccgtcggtcacctcaaacaggccgctgatgttaatcagctgcgactgccgccacaggctcgggttgacggtatccggggctttttcaccttctttgatgaaagagtactgttgcggatcccatactacgttaccttgttctcctttaatgatctcggtgggcagggcggcaataaaccctttatgggcgttggtgaaatcggtgttatcagagaaggggagttggttatagagagcgtcgttggcttgtttggtggcagcggtcgcttcttttgcggcgacttccgcccatgctgacaagctgatcgatgacagcaagccggcaatggctaatcctttcactatgggggtcaatttcattggaatcctcttaccttaatggcgattcactcgttaattccgatctgacgtggtgttacaacttgtaacgctttcttgaactataaccaattgtttacattgagcaagtttgtgattacaaaaaaatacattaattaaaaaactactcaatcgtaggtaaaatgagatttatccaatgggattaatgtcgcttatttagctcggcgtttgacgtgtcggctactgcggagaaggggaaaaaagcggcccttaggccgcttttaaattaacaaggaagcggcgctatttggcgtagcctaaaaatttaccgtcctgcatgacggcaatttttcctgattggtagacaataaaaacgtataaaccctgagaataggttttcgcgtcagcattgctttcgtctaaggccgcgggtttgccatcaactgtcagcccggttgagtttgtgaccagcttcatcccattgaagatcttcacttttttgctggattgcgctttctgcacgggatataaagcctgcgcattttccagcgcctgtttctccgctgcggcgttcaccgtagcctgtttgttttgttccgcaatataacaggcatctttactgatcccctgtgcttcgcactcggccatacgctgcgctggtgaactgcaaccaatcgcgatggctgcgctgagtgccagcagcagcatagaaacttgtttcactttcatcattaacgaccttagtgtcgaaattatttttaacatgttatgcaaactaacggcagcggcgactactgcggttactgtgtttgcttagttcgtaacgcgtagtaactatgtcgtatggttattaagtgaattgtgatctaaatcaaccgccgcacggatagctaaaattttgtgtaatcgcttacatggcgcaggaaaaagtggcgtctctgtggcaaacgtacaaggatgatacaacgacgcgtaatgacggtatgcaaattagccattatgatggcgctttctacaaggatcataagggattatgaagtggatactgttgaacaaattagtgggtacttctataaaggatactggaatctgaaaccagaggagttattcctgttgattctcatcgatgcgatgagtcagcatcttgaaattgaggcaacagccgcaactgctatcttaaccggacaaccctggataccgacgcgaacaaaaccaggtacagcaattaaaggaacgagtattgcttccataatgtctcgtaagctactcagtaatgtacgtttgccggttggtatctcgttaatcactcctatgggtaaaagtctgaaagactttcattggtcgaaaactaacaagctaggcgcggttataggccgctacataccatggatagggtgggcaatggcattttattatgctagagcaatactaattgatactggtgaaacttttaataagatggttaaaccagaacataaagttgcatggacatatttctaatgagcattgaacaagaaattattgattatatatatactcatcatagccataagaaatactgtttttttggcgaacgtccagaagtcacgttagatactgaattaacaaagggggggctgaatatcatctgggaagatgcagaagatactttagattactatttcaaacaatggaatgtaaaaatgaatggcttcgaaattatctattactttgaacctgagtttttaggttccatgcctccagagaagccgcttaaaccgctaacagtacaaatgttggttgagtccgcaaaagcaggtgaatggctgtacgattaagggacatatcgccgggagacataccgcttttaccgtttacaagacttatcgctggcattactatcttggtaagagattaacggaacgttagtcgccattttgtaccaaatgactcggggtgcccttctttgtgaaggctgagaaatacccgtaccacctgatctggataatgccagcgtagggaagtcagagaccgcatggtctgcgctgcttcctcatctggcgggagcaaaccatgcatcaaccgctaaatccggcgcatatcgcgcacctgcagcagcttttccgcacctcttcgccgcttgttcactgtatgaccaacgatgtggtccagactttcaccgctaacgtgctgctggctattggcgcctcgccggcgatggtgattgatcctacggaagccgcgcagtttgccgccattgccgatgcgctattgattaatgtcgggaccttaaccactgagcgcgccaacgcgatgcgcgcggcggcgcagagcgcccgccaggcgggaaaaccctggacgctggatccggttgccgtcggcgcgctgacgctgcgtaccgatttttgtcgcgaattactggaactgcggcctgcggcgattcgcggtaacgcctcggaaatcatggcgctggcggggagcagcggcggcgggcgcggcgtggacacgaccgatagcgtagctgcggcgttacccgcagcccaggtgctggcgcgcaagctcaatacagtggtcgcggtgacgggcgaggtggattacatcagcgatggtgagcgcacgcttgccgtgagcggcggtgatgtcctgatgacgcgggtggtcgggaccggctgcgcgttatccgcggtggtggcggcaagcgccgcgatgcccggcgatcggctgcaaaacgtggcagccgcctgcggcctgatgaaaatggcgggaggtgaagcggcgcgacacggcggccccggcagttttatcccggcattcctcgacgcgttatacgcggaggtgccggcatgaagcggattaacgccttaaccatcgccggcaccgatcccagcggcggcgccgggatccaggccgacctcaaaaccttctccgcactcggcgcttacggctgctcggtgatcaccgcgctggtggcgcagaatacccgcggcgtgcagtcggtataccgcattgagccggacttcgtggcggcgcagctggattcggtgtttagcgacgtgcgaatcgatactacgaaaatcggcatgctggcggaaaccgatatcgttgaagcggtggcggaacgtcttgctcgctatcaaattgccaacgtggtgttggataccgtgatgctggcgaaaagcggcgatccgctgttatccccttccgccattgcgacgctgcgccagcgcctgctgccgcacgtttcactgatcaccccgaatttgccggaggccgcggcgctgctcgatgcgccgcatgcgcaaagcgagcgcgagatgctggaacagggcagggcgttgttggcgctaggctgcggggcggtattaatgaagggcggacatctggacgacgccgaaagcccggactggctgtttacccgcgaaggcgaacagcgctttaccgcgccgcgcgtgcagaccaaaaatacccacggtaccggctgtacgttatctgccgcgctggcggcgctgcgtccgcgctatgccgattggggacaaacggtcgccgaagcgaagggctggctgtcggcggcgctggcgcaggccgattcgctggaagtggggcacggtatcggcccggtacatcatttccacgcctggtggtaaatggcagtgaaacgagacagcagaatctactgaaaaaacgcgctcccggctggaaaatatgctaactcggtaccaggcttaacctgcccaaaatttttgggttgggataaaacatgctggctgcggccagcacttacgggagatagctatgactgatattacgcagttgcttggcaaagatgccgacagccttttacagcaccgttgtatgactattccagccgatcaactctatttaccgggagcggattacgtcgaccgggtgatggtggataacaaccgcccgcctgcggtgctgcgtaatatgcagaccctctacaacaccgggcgtctggcgggaacggggtacctctccattctgccggtcgaccagggcgtagagcactcggcgggcgcgtcgttcgccgccaacccgctctacttcgatccgaagaatatcgtggaactcgccatcgaagccggctgtaactgcgtggcttctacctatggcgtactggcctcggtatcgcgccgctacgcgcaccgcattccattccttgttaagctcaaccataacgaaacgctgagctacccgaccgagtatgaccagactctgtacgccagcgtcgagcaggcgttcaacatgggggcggtcgccgttggcgcgacgatctatttcggctccgaacagtcgcgtcggcagattgaagagatctccgccgccttcgagcgcgcgcacgagctcggcctggtcactgtgctgtgggcctatctgcgcaacccggcattcaaaaaagatggcgtcgattaccacgtttccgctgacctgaccggccaggccaaccatctggccgccaccattggcgctgatatcgtgaagcagaaaatggccgagaataacggcggctataaggcggtgaacttcggttataccgacgatcgcgtctacagcaagctgaccagcgataacccgatcgatctggtgcgctatcagctggcgaactgctacatgggccgcgccgggttgattaactccggcggtgcggcgggcggcgaaaccgatcttgccgatgcggtgcgcacggcggtgatcaataaacgcgccggcggcatggggctgatcctcggtcgtaaagcctttaagaaatcgatgagcgaaggcgtgaagctgatcaatgcggtgcaggatgtctatctggacggcaaagtcaccatcgcataaggcaaaaatccgggcgcgaggcccggattggctattttacttaccccggtctccggggttttttatgattttgctgtgctgacgttcagcggttcagccgcttcgctggtagcaaaaccaggctgctcaacgcgaataaacgggcacagacaaaacgccagcagatagagcgcggtataggccaccaccacgccgatggtgctgaagtgcggcagcagcaccaccgcaatcgccggcgcgaggaagttcgacagcccggccgacaggttgtagaccgaaatcgccgcccctttatgctccggctccagcgccggaaataccgccgccatcggcacgaacgccgcgacaaaaatccccagcgcgatggccggcaccagcgccatggcgaagttatggccgaagtgctgcggcaggtagtaaaacgccaggctcgacagcgccatgccgatgcagccgaaccagcgcaccactttcatccagcccagtttctccgccacgataccccagaagacgttggagaagatggtggtgaagaagaacgccgcccacacctgcagccattcggaagtggtgaagccaagctcatcgacgaacatcatcggcatgaccaccgcgaagccgaacagcgacagggtgttgataatgcgcacgatgctggagagcataatgctgcggttggtgtagataagggtcaccgcgcggcccagctcggagaacttctcgcgggtggtgagattctgcatatggcgcggggtttcggtgttgcgcagcgccgccagggcaatcagcccgccggtgacacagaacgccagcgccagccacagggtgcccatctcgccaatgtgcggaatggtgaagctcggaatatagctgccgaacacgccgatgccgacggagtagaccgcccagaaccagcccagggccgagctggagctgtcgctgcggacgttatggataatggcgacgataaacgaatagaggaacagcggataggccaggccgcggatgccgtaaaacagcaggattaaggcgtagttggcgcgaccgaggccgaagacgaggaacaggacgtggaacacgcaccacagcacgaaaccgataaacatggttttacgcggggtgataatttccgcgaccacgccggagacccaggccgagagggcggcggcgaggccgtagagggtgaaggcgaaagaggcctgcgccgggctgaagcccagctccttgatgtagtgcgagagaaaggctagttcaaaaccatcgccggtcataaacacggcgatggcgacgtatccccagataagattcagcggcagaccgaaccactgttggttattaacggacatgttaacctcgatttcaggatgcagaggagcggctccgctgcacaacagcggagcattattgttattaaattaaagaggtatgttattcgcggattagccgaccggcctgttgtagcgctttgtaggcctcatacctgcgttgatgtagcgagctaaacgccgtttcgctacgataggttttatccactctggtgaaccgcttcatggcgtccggcagcgaggcggcgacgttgcccgcgacggcgccgaggatggcggaacccagcaatacgggttcgctactggctgtgctgaccacggtcacgccgcaggcgtcggccaacagctggcgtaccagcgggtgctgacccgcgccgccgctgataacgatattttcgttctcaataccacaggcgcgttgggcatcgaggatctgccgcaggccgtagccaattccgcataatccggcgacgtacagcgcggtcagattatcaagatcccgctccatccccagcccggcaatcagcgctttcgcgtgggggtcggcaagcggcgcgcgattgccgagaaactccggcacgacatgcagtccatcagccagctgcaccgcctccgacggcgaggcaacctgcgccagcacgcgatccgccagccagaccggcagcggaacggcggcggctttggcctgttcacgcgcttctgccgctgccggatggaagctcagtaactggtcgatagccgcgccggcggcgctttgtccgccttcgttcagccagtaacccggtaccatcgccgaatagtaaggcccccagacgccaggaacgaacaccgctttctcggtggtagtcatggtgcaggaggaggtgccgaagacgtaggccatattattcaccgcgccgttgagtacgccgacggtgccgatgccgcctgcatgggcgtcgatcatcccgaccgccaccggcgtaccgacaggcaggcccatctcttcagccgccgccgcggttaacccatcaccacagggcgtacccggatcgacaatgcgctggccgatacgagcgaagtcttcctccgccagctctgcgaggccaatctggcgaaagtagtcggcatcccagcgtttttcatgggccagataggtccatttacaggtgacggtacagacggagcgggccagatcgccggtcgcgcgccaggtgagatagtcggccaggtcgaagaaatggcgcgcggcggcaaaaatctgcggacggttttctttcagccatagcagcttcggcgtttccatctccggggagatagtcccgccgacgtactgcagcaccggatggcgggtggcattgatgcgctccgcctgttcggtggcgcggtgatccatccagacgatgatattgcgatccgcctcttcgctggggccgacggccagcggcgcgtcattctcaccgattaccaccaacgagcaggtagcgtcgaagccgataccggcaaccgagtgcggagagacggcggatttttcgaccgcgcgtttaatgcagtcgcaaaccgcctgccagatttcgcggctggattgttccaccacgctgccggcgctgcggaagagggtgatctcccgggtggcgtgggccagtagttcgccgctgaggttaaataccccggcgcgcacgctgccggagccgacatcgacgccgataatggtttgagtctcgccattcataaaatcgtccttttagtcaccgataccgggggttataaatcaacgctgttaggcaaaataaccaggtcgcgtacggtgacgtttttcgaacgggtgaccataaacagtaccgattcggcaacttcgataggctgcatcaggctaccgttggccagcgcttcttccattttctctttcggccagtcatcgagcagggcggtgaccaccgggccaggcagtaccgcgccgacgcggacgccgtgttgggaaacctggcggcgggtggtatgaacaaacgcctgtacggcgaattttgaggcggtatagataggttcccagataaccggtaccacgccggcgatggagctggtgaaaataatatcgccggatttttgcgcgatcatatgcggcagcacgctacgcacgcaacggaaggcggcgttagtattgaggtgcagcacgcgatcccagacgtccgggtcaccctcggcgaccgggccgccgatataagcgccggcgttggcgtggaagatatcgagacgcccggcaagctgcaggatgccgtcaatgatcttatccacctgctcgccctgcatcagatcgacctgtaaggcaaaagcgttttcgccaagctctgccacaatcttgttgagcttttcgccttcacggtcgatcagaaccaccttcgcgcccgcgccaagcagggttttcgcgcattcaagaccaatgccggaagcagcgccggtgaccgcggcgactttgccgctaagagaagtattcatagaggatacggagtggttcattttataatccttcatgttgtctgttttgctcttcaagctggtctcgacgagcttgaggagcggttacctgctacacaatctggcctgtcagagcaggagtaactaagttaagctattgaatatcagcaccatttatttcaatttgctgatgtctgaacgagtattgagtgtatacgctagcgagcgtcatggttgctcaatcgatgaagctaatgttgcgccagcttcatcgattgagcaagtggggaaattaacagcgaaatgaatttgtgacgcaagttgggaaaatgaaaaaaatcactatctacgatctggcggaattatccggcgtttcggcaagcgcggtgagcgcgatcctcaatggcaactggaaaaaacgccgtatcagcgccaaacttgcggaaaaagtgacgcggattgcgcaagagcagggctacgcgattaatcgccaggccagcatgttgcgcagtaaaaaatcgcatgtcatcgggatgattgtccccaaatacgacaaccgctattttggttccgtggcggaaggctttgaagagatggcgcgtgagcgcggcctgctgccgattattacctgtactcgccgtcgtccagaactggaaatcgaagcggtgaaggctatgctctcctggcaggtagactgggtggtggcgaccggggcgactaatccggataaaattaccgagctatgtcagcaggcgggggtgccgacggtcaaccttgacctaccaggctccaccgcaccgtcggtgatctccgacaactacgcgggcgcccgcgcgttgaccgataaaattcttgataacagtctcaatcgccacggcaaactggcgccgctgttttttgtcggcgggcgcagcagcgaccacaacaccctggagcgtttgcgcggatttcgcgatgctcatgaggcgcgcggcatgagcgtgccggaagagaatattctttctccgggctattcaaaaggcaaagtggaagcctgcatgcaggcgcgtttcaaaagcgccgatgaacatctgcaggggttcttcgttaactcgaccatctcgctggaaggggtggtgagatggctggcgcagttggggctgaccggcgtcgagcagccgccgatgggctgttttgactgggacccatttgtttatctattgggtcacgatattgacatggtgcagcagaacgtcccggcgatgctggaagcggtattcaatatcatcgacgcaggtgaagccagccagcagcgggtagagatcccgccgctgctgattagcagccgcgagcatctggcgtgaaaagccgctggcgctagcgcgtcagcagccagcgggcggtatgttcatcggtcaccaggccgttaatccagccgccttttaacgccgcaaggatcgccggacgcttgttctcgccgcaggcgacggctattcgcgggcactggttttggcggatatcgtagctggtgatcagccgattaatttcgctgtcgacgacgccgccgtcggcatcgataaagcggccgaggatctcgccgatgccgccgcgcgccgtcagttcatccagttggactttattaataaacccgtctttgaagatcgggctttgggtacccaatgggccgataccgacgaaaataacgtccgcctgctgcgctgcggcagaaacattgctgaacagtcggctgccgcaccacatctcatgttcctgacgggtttgcgcatagcgcggcgcgggccactgatagtagttggcctgaattttccgcgccagcagcaacggcacatcatcgtagtagttgcatttcccctcatcgttcattgcgctaatcagcgccacgcagcggctgtttgggctatcgaaatcaatgcgctggatggtttttttcagcgttaatccagaaccaatgccgattattttggcgttatcgctctgcaggtagcgggccatcagctgataacagccgaaagaaacgctatccagcgtgctctcttcgttgtaggtcggcacgatattgcactcgatgagttgatacttttcctgcaacaactgcgcataatcgaggcagttcgccacaggatgatgcaagccaatcgacacaataccttcttccttcgccgcggcgatcaggcgctggaccaccggccttgaggtgccaaggtggctggcgatttcgctctgattctgaccggcaatgtagtacatccatgcggcacggaccttctgatccagcctgatgtcgtcttctttactcacggtgtcctgccttaaatacgcgggcgcagtagcgcagatacccgcattttggctgcggttttccaaacaggcaagcttttgctctgttttggtcatttgtaatttaaatgggtaattgctcttttgtgatccgtagctcttatttgattcaaatgatcatctacagtgagccgcatcacctcaaggagagcagaacatgaatacgcaattcacatggcttcacatcggtctcggttcttttcatcgcgcccatcaggcgtggtacctgcatcgactgcgggtttccggcgattcgcgctggcatatcgcggcgggaaatattcgtaacgacgccgagcatgtggtgcaggcgctggcggagcagagagggcgctacgtcctcgagacggtgagcccggaaggggagcgcgaatatgaagagatcgcctcaattcaaaaattactgccgtggcaggcgggactgcagccgctgattgatgaaggcgcgaacccgcagactaaagtcattgctttcacggtgacggaagggggttattacctcaatacgcagcatcgcctggaaaccagcaacgccgatctgcaggccgacttgcagggggattgcaaaaccatttatggcaccatcacccggattcttgaaaaacgcatcgccgacgacgcgggtccgctgacgctgctcaactgcgacaacgtgcgccacaacggcgaacgtttccatgatgggctggtggagtttctgcaactgaccggtaaacagcaggttattgactggctggcggcgaacgcgacctgcccaaacaccatggtcgatcgtattacgccgcgcccggccgccgatctggcgccacgtatcaaagcgcaaaccggcatcgatgataaagcgccggtgatgggcgaaacctttattcaatgggtagtggaagataatttccgcgctgagcgcccggcgcttgagacggtgggcgtggagatggtggcgtcggttatcccctatgaagaggcgaagattcgcattcttaacgcgtcgcatagctgtattgcctgggcgggaaccctgttgggccagcaatatattcacgagagtacgcttaccgatgccatctacgccattgctgaccgttacgtcagcgaagatgtgattccgtgtctgggcgataacggcatcgacctggcaacctatcgcgacgtggtactcaagcgttttaccaacccctatatccaggacaccaaccagcgggtggcagccgatggattctcaaaaatcccggcgatgattgccccaaccctgcaggagtgctaccagcgcagcgtgcgcccgcaggctaccgctatgttgccggcgctgttctttgtctttatgcagcagtggcataaaggggctttaccgtatcagtaccaggacggaattctcgatgaatcggcggtgcatgccatgtttaattcgcctgatccgatcgcccggtatgctgctgataaagccttattcggcgagctggtggaatcggcggattttcaggcgctgctgcgtgagcaaatcgccgccgtctacgcgttgacccagcaggaggcgctatgtatttaggtatcgatctcggcacttcggaagttaaagcgctggtgctggatgaaaataatacggtcgtcgccagccatagcgcgccgctgaccatccaacggccgcatccgcaatggtctgaacaatcgccgcaggcgtggtgggaagcgacggaatacctgattgccactctgcgcgagaagtgcgcgagccattggtcggcaattaaagccatcggcctttccggacagatgcacggcgccgtactgctggatgccagcggcgaagtgattcgcccggcgattttatggaatgatacccgctgcgcgcaggagtgcgccgagcttgaagagatggcgccggagctgcatcaggtggccggtaatctggcaatgccggggtttaccgcgccgaaactgctgtgggtgcggcgtcacgaaccgcagcatttcgcccgtaccgcctgcgtgctgttgccgaaggattttctgcgctacaagatgaccggcaaaaaagtctccgatatgtcggatgccgccgggacgctgtggctggatgttgcgcggcgggactggtccgacgcgctgctgcagaagtgcggcctgacgcggcaacaaatgccggaactggtggaaggatgcgacgtttccgccacgctggcggcagacattgccgaacgctgggggcttaatccttcggtgctggtggcggggggcggcggcgataatgcggtcagcgcgattggcgttggcgcggtgtcgccgggagacgcttttatctcgctgggtacctccggcgtactgtttgtcgtcaccgatcgctatcgtccggcgccgcagtcggcggtgcatgctttctgtcatgtgctgccgaacctgtggcaccagatgagcgtgatgctcagcgccgccagctgtctgcagtggttctgtcgtctgaccggcaccaccgaagtggcgctgctggaggaggtcggcccagttaagcgaagacgaaaaagccaatgcgccatacttcctgccttatctttccggcgagcgtaccccgcataacgatcctctggcgcgcggtatgttctggggaatgacccatgccagcctgcgcgctcaactgggatatgcggtgctggagggagtgagcttcggtattgctgacggcctgcgcgtgttgcaggagagcggaacccgtatcgaccagtgctcactggtcggcggcggcgcccgcagtccgttctgggcgcaactgctggcggatatcctggcgatgccggtggtgacgcataaaggcggagaaaccggcggcgcgctcggagcggcgcggctggcctgcctggcggcgggcaagccgctggccagcgtttgtcataagccggaaatctggcaaacctggcaggcggatctgcagcgtcatcaggcgctgatgcagcgttacgcccatttccagtctctgtacctcaacgaccgacattttcgacagcaataagacatatgacgctccggcgaaactgccggagtgattctcctgcaccctacaacaacgaggtcaccatgtccgttaatcaccaacagtggctcggtctgccgctgaatcttatctggggatacgtcgccatcgccgtgtttatgaccggcgatggttttgaactagcctttctctcgcactacatcaaggagctgggcttcagcccggcgcaggcctctttcgccttcaccctctacggcctcgccgccgccctctcggcctgggtctccggcgtggtcgcggaaattatcaccccgcgtaaaaccatgtttatcggtttcgtgctgtggtgcgtgttccacgtcctgttcctcgtcttcggcctcggtcgcgccaactacgccttaatcctgctgttttacggcatccgcggcctggcctatccgctgttcctctattcgtttatcgtcgccattatccataacgtccgcagcgacagctccagctcggccctgggctggttctgggcggtctactccgtcggcatcggcgtgttcggcagctatattccgagcttcaccattccgcacattggcgagatgggcaccctgtggctggcgctggcgttctgtgtcaccggcgggctgattgccctggcggcgctgcgcaacaccgaaaccccgcgccatatgcagaatctcaccacccgcgagaagttctccgagctgggccgcgcggtgacccttatctacaccaaccgcagcattatgctctccagcatcgtgcgcattatcaacaccctgtcgctgttcggcttcgcggtggtcatgccgatgatgttcgtcgatgagcttggcttcaccacttccgaatggctgcaggtgtgggcggcgttcttcttcaccaccatcttctccaacgtcttctggggtatcgtggcggagaaactgggctggatgaaagtggtgcgctggttcggctgcatcggcatggcgctgtcgagcctggcgttttactacctgccgcagcacttcggccataacttcgccatggcgctggtgccggccattgcgctggggatttttgtcgcggcgttcgtgccgatggcggcggtgttcccggcgctggagccagagcataaaggggcggcgatttcggtctataacctgtcggccgggctgtcgaacttcctcgcaccggcgattgcggtggtgctgctgccgtatttcagcaccatcggcgtggtggtggcctataccgcgctctatctgctggcgttttgtctgtgcccgtttattcgcgtcgatcagccgggctttgcccgtaaggcaagcggcgtcagggaaggggtagaatattcataacgttgtcagggcgggtatatcccgccctgatgttttaacgcagtaacatacagtccggcggcagacggcagcgtagcgcctcgccgaggatttccatacggaaagatttgccgctcagcggttcgccatccaggttgaaggtcatttcatgggcggcggtgacttcaaaccacggcgatacgccgtcgatcagatttggcgaattatcgggattagcgagggtgctaaacagcgcaggcagcaactcttcgccggtgaaaatgcgcagatgcagtagcccgtcgttaattaatgcctcaggacacagttgctggccgccgccggcctgacggccattgccgatgccgataaccagcgcgtcaccctgccagtgaaagttctcgccgcgaatttcgcagcggtccggcttcagggtatccatgcgcgtcaggccgtgaatcagataggagacgccgccgagcgcggctttcagtttttccggcgtttcggtggtgatacgggtgccaaagccgccggtggccatattgataaaaccggcctcgttgttaacgcgtaccacatcaatagggacgtcgcgcccggctatcgccagcttcagcgcgctggctaaatcctgcgggatgccgacgctggtggcaaaatcattggctgtgccgagggggagtaatcccagcgccatgttgctgccgcgctgaaccagcgcggtggcgacttcattaatcgtaccgtcgccgccgccggcaattaccgtcgccaccttgagcgtttcggcttcctcgacaaaacgaatcgcatcgcctttttcccaggttacgcggacatgtatctcgataccttcttcgcgcagaagattaacggcttcgcgcagttgtggctcattcgcgcctttaccgttgagaattaataagctggctggaaattgggtcatcctttatcgcctcattctttgtcgtcatcctcagtgtatcgcatgaatggcatcatggaataagaaagtcgggaaaatgggatgcataaaaaataagcccgcgtaagggagattacgcaggctaaggaggtggttcctggtacagctagcatttatgggttatgtttttcagcgaaatggatgatacctgcttcgaacgaaacggtatgtgatccgattctaatatccatacataatgaaataataacgccaataaactaatttttatgcggattgcgcgtcgactcgccgttaaaattacgcatcagcaacccatactccagcgccatatcctccggcagcggcagccagacgatataaccgtctcccggcgcgaccggcattgcttcgcctttggcgttctccatatgttcgagcgtaaaattgacattaccttgcggagtcatgacctccaggctgtcgccgaccgagaacttatttttcaccgccacttcggccagatgaccctgacgcttgccggtgaattcgccgacaaactgctggcgttcggaaaccgaatagccgtattcataattctgatagtcgtcgtgggtgtggcggcgcaggaagccttcggtatagccgcggtgggccagaccttccagcgtctccagcagactggtgtcgaacggtttaccggcggcggcgtcgtcgatcgctttacggtacacctgggcggtgcgggcgcagtagtagaaggatttggtgcggccttcaatcttcagcgagtgaacgcccatctgggtcagacgctcaacgtgggcaatagcgcgcagatctttggagttcatgatgtaggtgccatgctcatcctcaaaggcggtcatatactcgcccggacgtttggcttcctcaatcataaatacctggtcggttggcgcgccgataccgagagtcggttcaacgttctgcaccgggataggttcatgcttgtggacgatattacccacgtcatcttctttgccttcctggacgttgtactcccagcggcaggcgttggtacaggtgccctggttagggtcacgcttattgatatagccggagagcaggcagcggccggagtaggccatgcacagcgcgccatggacgaaaatctcgatttccatctccggcacctggctgcgaatttcggcgatctcgtccagcgacaattcgcgggagaggatcacgcgggtcaaccccatttgctgccagaatttcaccgtcgcccagttgacggcgttggcctgtaccgacaggtggatcggcatatcagggaagttttcccgcaccagcatgattaaaccaggatcggacataatcagcgcgtccgggcccatttccactaccggtttgagatcgcgaatgaacgttttcagcttggcgttatgcggcgcgatgttaaccaccacatagaattttttccccagctcatgggcctcattgatgccgagctgcaggttttcgtggttgaattcgttgttgcggacgcgcagtgagtaacgcggctggccggcgtagaccgcatcggcgccataagcgaaagcgtaacgcatatttttcagcgttcccgccggggaaagaagttccggtttaaacatgattttctcgttctgatgacaggtcagactcgccgcaccaggtacggcgattcgggggagtgtccccacattaagggcgggcattgtagcgctgtggaaagagggagtaaaccttcgcgcctctctgcgctaagaggcgcgatgatcaagccattctacaggcgtcggcttcccagcgatagccaacgccgtagacggcgcgaataaacgactgctccgcgtccagcgactccagcttacggcgcaggtttttaatatggctgtcgatggtacggtcggtaactacgcgataatcgtcgtacagatgattgagcagttgttcgcgggagaagactttacccggctcctgcgacagcgtttttaatagccgaaactcggcgggagtcaggtccagcattttttcgcgccacgaggcctggaagcggctttcgtcaacaattagcggactttgcgcatccagagcctgcaggtcgcgctgtggtttacagcgacgcaggatcgtcttcacgcgggccacgacttcacgcgggctgtacggtttgcagatgtagtcatcggcgccgatttccagccccagcaggcggtcgatctcctcgattttggcggtgaccatcacaatcggtatctcggaaaatcggcggatctcgcggcacagggtcaggccgtcggtgcccggcagcattaaatccagcaggatcaaatgcgggggcgtctggcggacgtagggcagtacctgatcgccatgcgcaatgagcgttggcgcatagctcgcagcttgcaaatagtcgatcaacaactgaccgagtttgggctcgtcttccacgattaaaatgcgcggcgtgttttcatcaataggtaattcgctcatacatccctcgataaatcctgttccagaggtaactctactttaatgctaaccccgccaaaaggcgaatgaccggcgttcaggctgccgccgtgggcggcgacgatattcatacagattgccagcccaagaccggatccaccgctggcccggttgcgtgagccctcggtgcgataaaaacgctcacagagccgcgccagctgctcgtcgctaacgccggggccgctatcggcgaaatcgagcgtcaacatgcgaccattttgtttggcgtcaatctgcaggcggccgccgctgtcggtatagcgtaggctgttttccagcaggttattgaacagctgcatcagacgatcgcgatcgccgaaaacgatagcgttatccggcagcgagacgccgatggtcaagccgcggctggcgaaacgttcgcggaacgcccctgcggcgacctccagcagcgcaattaaatccaccgactctttctggtaggctaacgcgccttcatcggacatcgacaactgatgcagatcgtccaccagcttggtaagcgtgccgacttccgcctgcagcgaagagatcgaatccggggtgaatttacgcactccgtcctgaatagcctccagctcaccacgcaggaccgctagcggcgtgcggagttcatgcgaaatatcggccattaaatcgcggcgcatctgttggttacgctcaagcgtactggcaagctggttaaaatcctgcgccagacggcccagttcatccccgccggtgaccgtgacgcgggtggagaaatcgcccgctgccagcttatgggtgccttccaccagccgtttgaccggcgccagcagcccgcgggccagcgggaaggtggccagcgcggcgaggagggtggcaagggcgacaatcagccaactggtgcgtttttgctggcggtcgaaattaatatccgtgttgcgcgtgagccgctcaaccggcgaggcgatcaccgccccgacgctcacgccgtcgacgacaatgttacggcgggtaccgtcctgcgggaccggcgcccgcgggcctaccagcacgcgcccttgttgatcgacaacccaaaattgcgtgcgccagccgtgcggcggcatatcgggccgcgggccaggaccgggcattggccctggctcgccatgcgggcccggcccacctggtggacgttcgtcgttatcccgctcgaaggtgcgcagtaactggaagataaaacgatcgttgttgcgcaaaaatttccagtcgccgtgctgctcgtactgttcgctcagcgcgtcgccgagcatcgtcaatcgttgttcattaccgcgtttaatatagtcgataaagccgcgctcaaagctgatgcgcactgcccaatgcatgctaatcagcagcacgatacaggtggcgaaaatagccaggaacagcttaccggtgatacccgggcgccaaagtttcacgattcactccttttgcgtcggcggatgacggtgttgctgccgacatcgttcggtacacgggaaaagatgagcgccgggagagcgataatcaccgccatgctcagataggtatagaggaaaacctgatggacagctggcgcatcggcgctgatatgctgctggccgtacatgccgagcagtagcccggcgatggtcacgccgatactcatcgagagctgcatgaccattgagagcaggctgttaccgctgctggccaactcatcaggcaggtcttttagcgtcagagtattcatcgacgagaaacggctggagttaatcatgccctgcaggaacagcaccagcggcagcagccagtaccagccggccagtgcgacggccatgaacagtaaactcaccagcgccaggccgagcgtcgcgaaaaccagcacgcggcgataaccaaagcgattcactacctgcaccacgatgcgtttcatccccatgctgcccagcaccatggggatcatcatcagcccggcgtggaacggcgagaagccgaggccaatttgcaggaataccggggtcataaacggtaacatcccgctgccgatacgcccggcgaagctgccgccaagaccgagcgagaaggttttattgcgaaacagtttgaggctgaacaatgcgttaacgttgtcacgggcgtgccacaaataaaaaactatcgccatcaggccgccgacgaccagcacggcgagcagcagcggcgagatacccagcccttttttgccgtcaagcgccagcgtcagggcggccattcctgtcgccagcagaataaaaccaaggatatcaaagcgccgggtctgcagggtgtagttcggcatcaggcataatgtggcgatagcgccgatgatgccaaccgggatgttaatcaagaaaatccagtgccaggaggcatattcgaccagtaccccgccaagcgccgggccgagcagcggtccaacctggccgggcagggtgacgaaggtcatcgccgccatatactgatcgcgcggaacgattttcatcaccgttagccgcccgaccggcaccatcatcgcaccgctgacgccttgcagtacgcgggacatcactaactgatcgagagtgctggcctgggcgcagaacagcgaaccggcggtaaacaacacaatggcgctgaaaaagatattgcgcacgccgacccggtccgccagccagccgctggccggcagcatgaccgccaccgtaagcacatacgagaccactaccatatgcatgtgcagcgggctctccccaaggctattggccatcgagggcagggcggtgttgacgatggtggtatccagcgactgcataaagaagccgaaggccacaatccataactgccagcgtacgctggcgggcagatctgtcatcttattcgcttaccggttgagcaggcttgcgcgtaaaacgcagccgcagacgatcaaagaacaaatagaccaccggggtggtgtacagcgtcagcaactggctcatgaccagaccgccgacgatggtgatccccaatggctgccgcagctctgaaccatccccgcccgatagcaccagcggcagcgcgccgaatagcgccgccagggtggtcatcatgatcgggcgaaaacgcagcaaacaggcctggaatatcgcttcttccggcggaagattgccggtacgctgcgcttcaagggcgaaatcgaccatcatgatggcgtttttctttacgatgccaattaatagcatgatccctatcagggcgattaggctgaatggggcgccgaacaattccagcgccagcagcgcgccaacccccgctgacggtagggttgagagaatggttaacggatgcacgtagctttcatagaggatccccagcacgatatacaccgtggcgatggcggcgataatcaggatcacctgtgagttcatcgtctgctggaatacctgtgcggtgccggcaaacgatcctcgcacgctcgacggcacgccaagctgggtcatcgcccggtcaatggcgtcgctggcttccgacagcgatttgccggtcggcaggttgaaggagatggtcgaggcggccgataggccctggtggttgaccgaaagcggtgcgttcgccggttgccatttggcgaagtatgacagcgggatgggtttaccgtcgttactaatgacaaacatttgctccagcgcgctaacgtcctgggtataaagcggatcgacttccatcaccactttgtactggttcaaaggttgatagatggtcgagatctgccgctggccgaaagcgttgtttaacaggctgttggcatcctgcacgctgacgcccaggcgtgacatggtgtcgcggtcgtagaccagatccatctccgcgccgttatcttgctgatccgagttaacgtcagccagttccggcagtgccgctagcgccttgcggatttttggctcccattcacgcagcgccgacagatcgtccgataacagggtgtactgatagctggcgttcgactgacgtccgccaacgcggatatcctgcaccgccatcaggaacagattagcgccgggctctttcgccagttttttccgcagccggtcgatgatttgctgcgccgtttcgtggcgttggtcgcgcggtttcagggtgataaacatcataccgctattcacccgcgagccgccggtaaaaccggtcacgttatcgaccgccggatcctcgcggatgatcttcataaagtcctgcagtttgccgcgcatcgcctggaacgaaatactctgatccgcctgaatgccgcccatcagcaccccggtgtcctgctccgggaagaaggttttcggaatggcgatatacagccacacgctgagcgccatcgtaccgagcagcaccaggccagtcaggcgactatgcttcagcacccattttaacgatttgccatagccgccctgaatagtgaccagcaggcggccaaagccacgcttgcgcgttggttcatgaggtttgccgcttttcagcagccagccgcacatcattggcgtcagcgtgagcgacacggcgagcgaaataccgatcgctaccgatagcgtgacggcgaactcgcgcagcagacgacccggcaggccgcccatcagcagcagcggtaagaacaccgccaccagcgacaggctcatcgacagcacggtaaagccgacttcacggctgccctgtaacgcggcctgcagcggtttcattcccgcctcaagatggcgggaaatattctccagcaccacgatggcgtcatcgacaacgaaaccggtggcgatggtcagcgccattaacgacagattattgaggctgaagccgcacaaatacatcgcggcaaaggtaccgattaacgataccggcacggcgacggccgggataagcgttgcgcgcccggagcgcaaaaacagaaagaccaccagaatcaccagcgcgaccgaaatcaccagcgtttgttcgacctcttccagcgaagcgcggatggtgggcgaacgatcctgcgcaatctgtaaatcaatggcggcggggatggtacgctgtagttccggcaggcgggcgcgaatgctatcaaccgtctgaatgatgttggcttccggcagcttgcggatcatcaacaggatcgccggtttggcgttggtcatcccggcgttacgcacgtcctgcactgaatccgtcacttttgccacgtcgccaaggcgtaccgccgcgccgttgttgtagtggacgatcaccggcaaatattccgccgcggttttcaattcatcgttggtctgcacctgccagcggtgggtcttatcttccagcgcgccctgcgggcgacgcacgttggcgttatcaatggcgctgcgcacggcgtccagtgagacgccctggttaaatagcgcctgcgggttaaggtcgacgcgcaccgccggcagtgagctgccgccgacgtcgacatcgccgacgccgtcaatctgcgcgatggtttgcgccagctgggttgacgcgaaatcgtacaactcgccttgcgaataggtatccgaggtgagcgtcaggatcatgatcggcgcatcggacgggttagctttgcgatacgtggggcggctgggcatcccgctcggcagcagactttgcgcggcattaatcgccgcctgcacgtcgcgggcggcgccattaatatcgcgatcgaaattaaactccatgatgatgcgggtactgccaagcgagctcgacgaggtcatttcattgaccccggcaatgcgccccagcgagcgttccagcggtgttgccaccgacgaggccatggtttccggcgaggcgccgggcagcgaggcgctaatcatgatcaccgggaaatccacctgcggcagcggtgcgaccggcagcaggcggaatccgaggatcccgcatagagtaatcgccaacgagataagaatcgtcgccaccggccgataaatgaagagagcgaagaacttcacttacgcctcctcttcacggcgcgggaagcggctcttcatatacagcgatagccggtcgaacagcagataaatcaccggcgtggtgaataacgtcagtacctggctgagcatcagaccgccaaccataccaatccccaatgggcgacgcagctcggcgccgacgccggtactgagcatcaagggcagcgcaccaagcagggcggcgagggtggtcatcagaatcggacggaagcgcagcaggcaggcctgataaatggcttcgcgcggcggcattccctgctcgcgctcggcggcgagggcaaagtcaatcatcatgatggcgtttttcttcacgataccaatcagcagaatgatgccgatgatggcaatcacatccagctcgctaccggccagccatagcgccagcagcgccccgacgccagcggtcggcagggtggaaagaatggtgatgggatgaatgaagctttcgtacagcacgccgaggacgatatacatggcgacgaccgccgcgacgaccagccagacggtgctaccgagcgccgactggaacgcgagcgaactgccctggaactgggtgcggatgtcgcttgggaaatccagcgactgctcggctgacaaaatagcctctaccgcttcgccgagggagtagttatccggcacgttgaatgaaatggtggtcaccgggaactgatcgagatggttcaccgacagcggggtaaaacgctgctcgacgctggcgatggatttcagcggcacgataccgccatcgctgctggtgaggcggatattatccagcgccgctagccccggcgtcgcctgggtgtcgtgctccagtaccacacgatattggttggcctgggtataaattgtcgagatcagccgttgtccaaaggcgttatacagcgcgttatcgacatccgccatggaaatacccagccggctggcgctatcgcgatcgacattaatataagccgcgagccctttatcctgccagtcgctgctgacgtcggcaagctgaggtaaggattgcaggcgcgacagcaattgcggcacccagttgctcagggcatcaagcgagttagcctgcagggtaaactgatactgagtgcgactgacggtggtatcgatagtcagatcctgcgttggctggagataaagctcaatacccggtacgctagccaccgattgctgcagacggctgatgaccgtttgcacgcgatcgtcgcgttcatccagcggtttgaggttaatttgtagacgcgcgctgttcagcgccgggttggtgccatcaacgccgacgaacgaggtcaggctttcaaccgccggatctttcagaatcagatcggatacctgctgctggcgttgcgccatactggcgaacgacaccgactgcggggcctgtaacgtgccttgaataatgccgttatcctggattgggaagaagcctttcgggataaagacccacagcagaatcgataacgccagggtgcttaacgccacgctcaacgttagccatgggtggtttagtacccggcttagccagcggccatagacggcaatcacccgctcgaagaaacgctcgctggcccgcgaaaagcggttttgtttgcgcagcgattcgtggcttaacatccgcgcgcacatcatcggcgtcagggtcagcgagaccaccgccgaaatcagaatcgccaccgccagggtaatggcgaattcacggaacaatcgcccaacgatatcacccataaacagcagcggaatcagtacggcaatcagcgagaaggttaatgaaataatcgtgaagccgatttcccccgcgcctttcagcgcggcggcaagcggtttctcacctttttcaatgtagcgggagatgttttcgatgactacgatggcgtcatcgaccacgaagccggtggcgatggtcagcgccattagcgtcaggttattaattgaaaaatcgaggaacaccataaccgcgaaggtgccgaccagcgacagcggcacggctacgccggggatgatagtcgccgggacattgcgtaagaagagataaatgatcatcaccaccagcgcgatggccagcagcaattcgaactgggtatcgctgaccgacgcgcgaatattggtggtgcggtcagaaagcacctgtaccttaacggatttaggcaagctctcggtcagttgcggtagcatctggcggatgctgtcggcagtggcgatgatgttcgctcccggctggcgttggacgttcatcactatcgcccgctgcttattggcccacgcccccagccaggcgttctcggcgccctgttcgatggtcgcgatatcgccaagacggatcggcgcgccgttctgataggcgataatcagccgacggtaatcttccgccgactgcatctgatcgttggcggaaagggtgaccgcacgggccgggccgtcaaggctaccttttgctgaattcacgttggcgctggtaatggcggtacgcacggtttcgctggtcaaacctaacgcggcgatcgcctgggcattgagcttaacgcgcaccgcaggacgttggccgccggccagcgtcaccaggccgaccccggaaacctgagatatcttctgcgctacccgagtttccaccatatcttcaacctgcgtcatcggcatcgcgctggaggtcacggccagggtcatgatcggcggatccgccgggttcactttgctgtaaaccggcgggttgggtaaatcagacggcagcaggttggtcgcggcgttgatggccgcctgcacttcctgttcggcgacatccagcgccagggtcagttggaactgcagagtaatgaccgacgcgccgcccgagctttgtgaggacatctgcttaaggccggacatctggccaaactggcgttccagcggtgcggtaatcgatgacgtcaccacatccgggctggcgccggggtagagcgttactacctgaatggtcgggtagtcaacttccggcagcgcggagaccggcaggaagcgatagccgatgataccggccagcagaatggcgaccatcaatagcgttgtcgccaccggacgcataataaacagccgggaagggccgcccgtactgcttgggggtaatacttgcatcaggcgcccgctccgtttttaccactcgggcgggtggtaggttgttcctgcacggcgctgtgagcttcgacaacttcgaccttagcgccttccgtcaggcgatcgataccatcggtcaccacccggtcgcccgctgacagcccggcgttaatcaccactttttggctatcctgaatacccggcgtgaccgtatgtttactgactttattctcactgttcagcacccacacgaagtgcccctcgttgcccatttgtagcgcggcggtggggatcactaccgcatcctgctcggtatccaccagcattctggcgttgacgaactgattcgggaacagagcgtcatcgaggttattaaagcgcgccttaagcttaatggtgccggtggtggcatcgatttggttatcgaggctcagcaggctgcctgtactgatcttctgtttattggttcggtcccaggcctcgacgctcagcgttttaccggctttctgcgcctgtaccacggtggcgatatcgctttccggcagggtaaagaccaaatcgatagggtgagtttgcgtgagaacgacaatgccggtggtgtcgccactggagatttggttgccgatgtcgacctgcttcaggcccacgcgcccgtcaatcggcgcggtgatgcgggtccagtccagttgcagttgcgcactggcgacggcggcctgatcggctttaaccgtgccggcggattcgaccaccagcgactgctgggtatcgagctcctgacgggagataagattggtttttaccagttgttgatagcgagcgagatcgcggcgcgcgtttgcgagggtagcgttatctttggcaagctggccctgcgcctgggccagcgcgactttgaactggctgggatcgatttgcgccagcagatcgccggcttttacctgctgaccttcctggaaatggatactcagtaactggccgtcaacccgactgcgcacggtcacggtgttcgccgcggcgatagtccccaggccagtaaggtagcgggggacggattcgctggtggcagtggccgcctgtaccggggccagcgtggccccaaaacgcccgtgacgcgccccggcaggcgcctttgctccttgttgactcgcgccagcagcgcctgcggttgtctcttcggcgcgatcgtgccagaaccaataggcggctcccgccgccaaaattaccgtcaggactattccccaacgaagtgtgttactgcttttcattattttgctatctcattctgaagctttcgctgaatgatactagtttagtaacggaacgccccgcaaaaatggaggaattatgaaaagcgcgtatggaaaggtctgaattggcgggctttcacgaggaggctcgcaaagccgaacgctgaaaagaaatgtgtcagaggcggcatggtaacgtcagcttgatttagcggaggctaaatacaggaaagcccctcctgaggaaggggccttaaataaggaaagggttatgatgaatctactcatcatactgatagtgctgttactgataagtttcccgacttactaacagtgtatcagggggaggagaaatcctcccttacccttcatcctgcaagttaggacgaaaaagcggcaaagtcaactcaggttaccggatggcgctcgcgtttcaggcgaaaaccacctgcgcccagcgggcaagcccggcggtaacggaaccaaaatcatcgccgccggcgatcggtatccccggcagctgtgcggccagcgcctttttaattaacggcgatcgcgcgctaccgccggtaagatagataacgtccggggtttcttgactgctttccagcgctaactttacctgctccataatgcgagccagcggttgattgagcgcctcttccagcccctgctggctgatagcggtagccagctcatcgctaataaacggcagttcggcgttgaaatccggctgagcggaaagggcgattttgctctcttccgcgctgcgtaccaggcgatagctcagacgctgacgccagactttaagcagcagtgcgaccttgtcggcatcgcgagcgtcgcgcagcaggtcattgagcatacgtccgttggcggcgctgtaaaaatcgctctgcgccgggacgtcgttaatcgccaccgcattccaccagggcagtaccggcagcgcaatgcctttttctgtttcaccgcccatgccgagtaacggcatcaggcatttgaaggccagggcgatatccagatcgttaccgccgatacggcagccgctgtggcccagcaggctatcctgacggtcggctttctgccgccattgcggccccatcaacagcagtgagcagtcggtggtgccgccgccgatatcgacgaccagcacgcgtttttcatcattgagtgtggcttcaaaatctaaccccgccgcaacgggttcaaactgaaacacgacatcgttgaatcctgctcgcgtcgccgcgcgttcgagaataccctgtgcctgagcgttagcgtcatcgccgccaagaccctggaagttaattggtcgaccaataaccgcttgggtaatctgttcactaagctgagactgcgcctgctgtttaatatgcagcatcatcgcgcagaccagatcttcaaataacgcgacctgctggggtttcaggccattggcgccaagaaacgattttggcgacttaacgaaatagacctcttccggatcgtcaacgtattgatgcagtgaggcgaggccgaactggacgctgttgcccaggacttcgatatcttcatcacggttataattaatggcgcgtcgaagtagcgcctgattttctgcaccgtcggccgggacattatgatggcggtatagccattcgctgaccgcttcgcgcgtcggggcgcaaagcattgatggcagcagcgggctaccgttttccagcgttaaaagccgtggcgcattatcctgcatgacggcgaccgaacagttggcggtaccatagtcaaaaccaataaacatgacctgaaaaatccccatgccagtgaagaaggggggcgactttagcggattgccgccatgccgacaactggaatttaaaagcaaggcgcagcaggcttagagcatctatgcttgttgcgattaataaggagagtgcatgacattattatcctggcgagcgccctatgactggcaatggatgttcgcgtttctcagcgcgcgtgcggtggcgggaattgaaaccttccatgaagatcaatatacccgcagcttcagtttagatgggcatcgtgggttgattaccgttaaaccggatgaacgcagccaggggttccaggtgacgctttctcatgggctgttaccggtagcagaccagtgcctggcgcgtgtagcgcaactgtttgatttagcatgcgatccatttgaggtcacgcaaaccttaggcaaactggcgcagccgcgaccaggacttcgcttgccgggggcgctggatgcgtttgaacaggcggtgcgcgcggtattggggcaactggtgagcgtagcgatggcggcgaagctgacggcgaaagtggccgcggtctatggggaagcgttaagcgaagcgcctggttatgttatttttcccgaaccgcagaaactggcgcaagccgaccctttggcgcttaaggcgttagggatgccgcttcgccgcgcggaagcgttaattcaccttggcaaagcggcattgagcggagaattgccgttgacggcacctgctgatatggcaaccggcatgaaacaattgcagagtctgccgggcatcggtcgctggacggcgaattactatgcgctgcgcggttggcaggcaaaagatatttttctgcccgatgactatctgattaaacagcgttttcccggaatgacgcctgcgcgtattgcgcgttatgccagccgctggcaaccctggcgctcctatgctttgttgcatatctggtacaccgaaggctgggtgccggacgaggaataggcgtacagggcgcatatcactggtatcgccgccctgaaatccctataattgccgcgtttgacggtcaaccgtcaccctccatctacatccaggttaatcaggtcgcaaaaatttatgactgatacgtctcatcagtgcgtcattgtaggcatcgccggcgcatcggcttcgggcaaaagccttatcgccagcacactttatcgtgaattacgtgaacaagttggcgatgagcatattggcgttattccggaagacagctattacaaagatcaaagccatctgtcgatggaagagcgtgtaaaaaccaactatgaccatccaagctcaatggatcatagcttgctgttccagcatttacagacgctgaaaagcggccagccaattgaattgcccgtgtatagctacgttgagcatacgcgtatgccggaaactattcatattcaaccgaagaaagtgatcattctcgaagggatcctgctgttgacggatgccagactgcgcaatgaattaaacttctctattttcgtcgataccccgctggatatctgtctgatgcgtcgcatcaagcgtgatgttaacgagcgtggccgttccatggactcggtgatggcgcagtatcagaagacggtgcggccaatgttcctgcaatttattgaaccttccaagcaatatgctgacatcattgtcccgcgcggcggtaaaaaccgtattgccatcgatattctgaaggccaaaatcagtcagttctttgaataacacgtactaattgtgtaacgtgcaaagagaatcccaattgcccttattcccggaaagcgtaagggctagatgccttaaaggagaaagctcatgcgtctgtgtgaccgagatatagaagcctggttggatgaagggcgcctggcaatcagcccgcgcccgccggtggatcgaattaacggcgccaccgttgacgttcgcttaggcaataaattccgtaccttccgcggtcatacggcgccgtttattgacctgagcggcccgaaggcggaagtgagcgcggcgctggaccgggtaatgagcgaagagatcgtactgccggaaggcgaggctttctatcttcatcctggagaattagcgctggctgtgacttatgagtcagtaacgcttccggctgacctcgtcggctggcttgatggccgttcgtcactggcgcgcctggggctgatggtacacgtcactgcgcatcgtattgatccgggctggtctggctgcatcgtgctggaattctataattccggcaagctgccgttggcgttgcgcccgggaatgcccattggcgcgctgagctttgagccgctttcgggcccggcggcgcggccatataaccgccgtgaagatgccaaatatcgcgaccagcagggcgcggtagcgagtcgaatcgacaaggattgataaagttagcggcttatcgaggatgccatgagacgaattctgaccacgctgatgattttgttgaccgtcattgttgcggggctcgctgcgctggtgctgctggtcaaccctaatgacttccgcaactatatggtgcaggaagtggcggagcgtagcggctatcaactgaagcttgacgggccgctgcgttggcatgtttggccgcagctgagtattctctccggtcgtatggcgctgacggcaccaggcgcttccgaaccggtggtgcgtgccgataacatgcggctggatgttgcgctgatgccgctactttctcaccaactgcaggtgaagcaggtgatgttgaaaggcgcggtcattcagcttaccgcgaaaacggaagcggtgcgtaaccagaacgcgccggtggtgccacatgacaatacgttgccgcaggcgccgcaagatcgcggatggtcctacgatgtccgtaaactgcaggtggccgatagcgtcctgttcttccagcatgaaaatggcgaacagctcaccgtgcgcgatatacgcttacagatggagcaggatgacaaccatctggcgacggtagatttctccggcagggtcaatcgcgatcaacgtgacttaacgttgtcctttaccgcccaggttcagggcggcgattaccctcactctttgaaagcggatttttcgcagcttaactggcaggtacgtggggcggagctgccgccggacggcctgagcgggcagggaagtctgcaagccagctggatcgaagaagcgaaaaaactcgatttcaacaatctcaatctcactgctaatggcagcgcaattaccggcagcggtagtgttgtactgggggagaaacctgactgggcgctaaacctgcaggcgaccaccctgaatctggatagtttgcttgcgcaaagcgcgacggccaatgaagggaatgtcgatcagcgtggacaaagccagccgagacagctacgccctgtgattgctgatagcgatattcagcaggattatcatagtttgcttggctttaacggccaactggcgctgtcggcggaccaggtgcagtggcgtggtatgcgattcagccaggtgaagagtaatatcactaaccagcaggggctgctgacggtgaaacagctggagggtagtctgggagagggacgtctctcgttaccagggatgctggatgtcagaggcaacacttcgcatgccgctttccagccacaactggataatgtggaaatcggtaccattttgcaggcgtttaactacccgattaacctgacggggaaattatccctgaaaggtgatttctcggggccgcgcattgatgcagaagacttccgtcgcaactggcagggacaggcacagctgcagatgaaggatacgcgtaccgaagggctcaacttccagcagctagtacagcaggccgtggcgaggagcactaatgtacaggcgcaggaaaactttgataacgcgacccagcttgacgcattaagcagtgatttgaccctgaataatggccaaatcacgcttaacggcttgcagggacagtcggcaatgatggcgttgaccgggcaaggtaatctgaatctgcaagcagaggattgcgacatgcatttcaacgtgcgggtgttaggtggttggaaaggcgaaagcaagcttattgatcgtctcaagcagacggcaatcccgctacgtatctatggcaagtggcagtcgctaagctatagcctacaggtagatcagatcctgcgtaagcagttgcaggacgaagccagacagcgtttgaatgagtgggcggaacgcaacagtaatagccagaacggcaaagatgtgaagaaactgcttgataagctgtaatcattaaaccgccgcgagcagctcgcggcggttttgagctaatcaccacataacttcattcacacttcataatctaattcatcttctacttcaaccggcgggataatctgtactttctgcaccctgtggctttccacttccagagtacgcagcgtataaccgccgattttcacttcttcgccagcggcaggaatgtgctgcaaatattccatcaataatccggctattgtgtgatattcacgtttatcatccaacggcagcggaacgtattgaaccagatcttccagcggcatatggccgttagcggtccagctgccatcggcgtttttgtgaatgtcatgacgagcatcgatctcctcgacttcattaggcagattacccgcaatggtttccataacatcgctgatggttaccaggccttcaacggagccaaattcgtcaaccacaaaagcaaagtgcgtccgcgcctggcgaaactgctccagcgccgggagcaacggcaaggtttccggaaaaataagcggttggcgtagcagaacgtgtaaatccagcggctcattgcgtaacgactgctgtagcaggtcgataacatgaacaacccccaacagatcttcgttatcgttgccgccggtgacgacaatacgggtatgctggtttttctccagcagcgcgcgaacttcctcttcaggcgcgcttaagtcgatgtgctcaatatcatgacgtgaagtcataatgctgctgacggtacgttgattcagattcagtacgcgctcaatcattaagcgttcctgcggattaaacaacggactttcgccctggtcggcgaccatggttgccgtctcggtatcaagctcagcattctctttgcgcccgcttagcagattcatcacggcttcagtcgtccgctgtcgcatggtcagattggccgagaggaaacggcggcgattgaagatggctaactggttgaacgattcgatcatcaccgagaaaccgatggcggcatacagatagcctttcgggattgggaagccaaatccttcggcaatcaggctaaaaccgatcatcagcaggaaactcaggcacagaatgacgatcgtcgggtggctgttgacaaagcgtgtgagagctttgctggccatcagcatcagcgtaatggcaatgatgaccgctgccatcatcaccgccaggtgatcaaccatacccacggcggtaatgaccgaatccagcgagaaaatagcatcaagtacgactatttgcgccaccacgccccagaacttcgcgcctttacgctgggtggggttattactgtcttttccttccagccgctcattaagctcaacggttgctttaaacagcaggaacagtccaccaaataacatgatcaaatcgcgggcgctgaagcttaagccatgccagttgaagagcggtgtcgtgagggtgactaaccaggaaattgacgccagcagtaccagacgcatcaccattgccaatagcaggccggtaacgcgagcgcgatcgcgctgtgccgggggaagcttttcagcaaggatcgcaataaataccaggttatctatccccagaaccagttcgataaccaccagtgtaatgagaccagcccagatcgagggatcggcaatccattccataatcacttagaacctttacaacataatcgtatgatctatcgatcatggataagcgccaggtaaaatgcaacgatttatcgcggcaacgcgcaccagtctggcatatcaaacgaaagcggtaacgtaattaacaaccgctaaatatcgggtgtttaagatcgatctgggctgatttggaattaattagaaatccctgtaattactgtgcggtaatagcagggataaggaggggttattaacagcgggtaaagtcaaaatattgccgtatttttcaccaaaatgttattaaggggaatattcctactgaattccgtagcttgtcaggacctgcgtttaataagacccttaacatggctcaatgttgcataaaatcagcagtatcagcgatggtcaaggggttaatccacgggtaagaaggttagttagcgaagcttttgtccaaagtttagacgattttgctgattgttatcgtcaaattgctcgttcgcatgggatttgactttttctgtagtggcttaccacggtgatttttaagaaagaaggtgttaaatctgcaaagtaagtagcttatcgccaggaatattgatcaattattattgtttaataacaatggattaagcgtttttcttgctctgtctattcgaaggccgattgaccaggacaaacgcgtgagaattttcttaaagcgacctgtcagctagcattttttgcgtgtattcttggactaagagagtaatttaggattttggttaaagtcgtgcgcgacacgatgctgtaccatcacaaacaaatgccagtgacatcaacgttctgacaaaaattcgaaagtttataaccatataggtggatgaaataatggtgagtttgaaagcaattattccggtagcagggttagggatgcatatgttgcctgccaccaaagcgataccgaaagagatgctgccaatcgttgataagccgatgattcagtatatcgtcgatgagattgtcgccgccggaatcaaagaaattgtgctggtcacccattcatctaagaatgctgtagaaaaccatttcgatacctcctatgagctggaagcgctactcgagcagcgtgttaagcgtcaactattagccgaagttcaggcgatttgtccgccaggcgtaacgataatgaacgttcgtcaaggccagcaactgggcctggggcattctatcctctgtgcgcgcccggcggttggcaataatccgtttgttgtggtgttaccggatatcattcttgatggcgcaagtgccgatccgctgcgttataacctggcggcaatggtcgcgcgtttcaatgaaaccgggcgcagccaggttctggccaaacgaatgcctggcgatctctcagaatattccgtcattcaaaccaaagatggcttgaaagtggaaggagagattggccgtattgttgaatttattgaaaaaccagacgaaccacaaacgctcgactctgacctgatggccgtaggacgttatgtgctgtctgctgatatctgggaagaactcgagcgtactgaacctggcgcctggggccgtattcaattaacggatgctattgcggcactggcaaagaaacagtctgtcgatgccatgttgatgaccggtgagagctacgactgcggcaaaaaaatgggttacatgcaggcttttgtgagttacggcttacgtaaccataaagaagggaccaaattccgcgagagcatcaagaagctgctggcgtgaaactgagcgcttaatacgagcgagagctggcgtgcagataacagcaagatgttgggtgtcgcgccagcgtaacaagatccaactgaaatgaaaccgaggtttttcgtcattcggtgcagtaaatgcaatgagattttcatctcagttgaatcttatcaagtatgtggatttgatggcttatcgatgattggcagggcgtgagccgggcatttggtcagatgagtcaaaataatgcttagctgatagttgcttagtatgagctttcttaacgaaatgtacgcaacaaaagctagcgatgcgaaataaaacttgactgagatcatgtttacccattaaacaacggtgatacatgcttaaaaacgtaatgttaatggatgaatatgcccatagggagatcatggataagatacagggaaaagggatgtatcgtcaaaggatgaagcgtaaatgaactggcaattagtctctttttttggtgatagtaccgtgctactgcctagtgcagtggtgctgtttgcggtgctggcgctgcgtaaagcatcccggacgctggcctggcaatgggcgttgctttttggcattacgggtactgtcgtgtgtatttcaaagctggcttttatgggctggggtattggcatacgggaaatcgattttaccggtttcagcggacataccgcactttcgaccgctttttggccaatccttttatggctgttaacctcacgggcgcctttctccgtccgctgtagcgccgtattcgtaggttatgcccttgctgccatagttggctattcccgtttgatgattcatgcacattcggtatcggaagtagtgagtggatttatcctcggagcctgcgggagtttgatttttctgctgttgcaatggcgtacgcattcatcgcgcactgcgcagatctcatgggcaggagcgctgagcatggtaatcattcccctcgtgctgttaaacaccggggctaaagcgccaacacaatcgctgctgggggaagttgcaaccatgatcggcccatttgacaaaccgttcaccagagccgatctgcataagcatatatattaatcatgcaattcggcaaagctgtacattatcagcctggggtgattggtatgataaaatgccagactgcggacaattaagggataatagaatcatggctttcataaagatgaaacataataatgctaacagaatacttgaaagcacgaactatcatgatattgcagctaggatgattcttaaatcaaaacggaatttcggaaatcagagttatctttctggaacccataaacgaagtgggtaatgatggctatcatattttgtagttgactgttctatagttgtttttttgcattaaacatgcggattattttattttctttataatcatgcagttacgtatccatgctgttgcggtggtaatatcatgccggatggggaaagaatccatcaaataatcttattaacggatgaaatcctgccggggaaaatgaaaaatatcatcttaacaggtctgtgtggttaaatttatactgccatttgcaggaagaatctcgtaaactcagggcggtaaaaataatagttgtggttaattaagcaacaacaggacgtaaagaaaattgctggataagaggtacagtgcgttggtagctgttaagccaagggcggtagcgtatccagttccccggtcctcctcgtattgaaaaggcctgagtcaatcagccctacgccgagctacgtcatcgacatctgatcatgtgcacattattgaggccgtgaaagtagccttggcaaccaatatcgcttacattatgaatgcgttaagttcacatccgtttacagcaaaccgctcgtactttgaggatgttgtctatcgaggcaatggatcgctgttgtaaaaaataggcttgtcgaactcataagctcctgattcttaaaaatccccattgccgtacccacctggtgggaagggactcgtaaatggaacttgaacaatgatgaaaattgctcgtatcgcacttgctttgggtctggttgcatcagttagctcacaggtatatgcagctggattggtgcaaaatgataatgaactgcgtaacgatctggcatggctttccgatcgtggggtcattcatctcagtctttccacctggccgctcagtcaggaagaaatcactcgagcgttgaaaaaagcaaaaccttcatattcctctgaacaagtcgtactggcgcgtatcaatcagcggctttctaatctgaaggcggattttcgcgttagcggctatacgtcgactgaccaaccaggcacgccacagggctttggccaaagccagccggcagataactcgctatctcttgcttttaataacagcggtgagtggtgggatgtgcatttgcagggcaatgttgaaggcggcgaacgtattagcaacggttcacgttttaatgccaatggtgcatatggtgccgtcaaattctggaaccagtggttatcatttggtcaggtgccgcaatggtgggggccgggttatgaaggcagcctgatccgcggagatgcagccagaccgatgaccggttttttaatgcagcgcgcagagcaaacagctccggagacatggtggctgcgctggattggtccgtggcagtatcaaatttccgccagccagatgaaccagtatacggctgtgcctcacgctaagatcctcggcggtcgtcttactttcacccccttccagtcacttgagcttggcgcttcacgcataatgcagtgggggggggaagggcggccagaatcgtttagcagtttctgggatggttttacgggtaaagacaatacttcatcaaatgatccaaatgaaccaggcaaccagcttgcaggttttgatttcaaattcaaacttgagcccactctgggatggccgatcagtttctacggccaaatgattggcgaagatgaatcaggattcttaccttccgcgaatatgtatcttggcggtatcgaaggtcatcatggttggggtaaagatgcggttaactggtactttgaggctcacgatactcgttctaatatgagtcgcaccaattacagttatacccatcacatttataaagatggttattaccagcaaggctatcctctaggcgatgccatgggaggggatgggcagctatatgcaggaaaagttgaattggtgaccgaagataatcaacgttggagcactcgattagtatacgcaaaggttaacccgagggatcagtcgattaataaagctttccctcactccgacacactgaaaggtgttcagctaggctggagcggtgatgtttataagactattcggttaaatactaatctttggtacaccgatgctgataatagcgatagggatgatgtaggcgccagcgcaggaatagagattccgtttagtttttaaactggatgctgcgaagtggcttgatacggcagttaatcgtgagatcagggtttaaattgcagctcataaattggcaaatttggtttagtgatgatgtgacattatgaagaaaactattgttagggtttcagcagtggcattggcgattagctttttaacaggttgtactatcgtacctgggcaggggctaaatagtttacgtaaagacgtagttgagttgccggacagcgattatgatatcgacaaactggtcaacgtatatccgttgactccagggttaattgatcaattacgcccggaaagcgtagttgcgcgaccaaatcaacaactcgacaatttactgcaaaattacgaatatcgcatcggtgttggtgatgtgctaatggtgaccgtatgggatcatccggaattgacaactccagcaggtcaataccgtagtgctagcgatactggtaactgggtgaattctgatgggacgatgttctacccttatattggaaaggtgaaggtagcgggtaaaacgctgagtcaggttcgtcaggaaataaccagtcgattaactacctatattgaaagtccgcaggttgatgtaagtatcgcagcctttaggtcgcaaaaaacttatgtgactggcgaggtcatgaagtccgggcagcaaccgattactaatattccactgaccgtgatggatgcaattaatgctgctggtggtttagctcctgatgctgattggcgtaatgtaatactgacacataatggtaaagatacaaaaatttcactttatgccttgatgcaaaaaggagatttaactcagaatcgtctcctctatccaggagatattctgtttgtcccacgtaacgacgatctcaaagtctttgttatgggggaagttggcaaacagagcaccatgaaaatggaccgtagtggtatgactcttgccgaagcattaggtaacgcagagggaatgtcgcaatctcttagtgacgctacaggggtatttgttattcgtcagttgaaaggtgataagcaaggcaaaattgccaatatctatcaactgaacgctcaagatgcgtctgctatggtgctaggtactgaattccagttacagccatatgatatagtttatgttactgccgctccattggtccgttggaatcgcgtaatttctcagctagtaccaacgatcaccggagtgcacgatatgactgaaaccgttagatatattagaacttggccataattatgtttaattcaattcttgttatttgtacaggaaacatttgccgctctcctttaggggagcggtatttgcgagcaatgttaccaaatatgcgcatagattccgctggaacaggggcccttgtgggccatgccgcagatgagtctgcagccaaaattgctctgataaatgggttaaatttggacggccatcaaggtcgacaactcactgcatcagtggctagagattatgatttaatattagccatggaaaaatcgcatatagagtatgttagtcgaattgcaccagaggcccgcgggaaaacaatgttatttggtcactggctaagtcaaaaagagattcctgatccctatcgaaagagtgaagaggcatttgtctctgtttattctttaatcgagcaggccggtaaatattgggctgaaaaactgggctcataattattaggaacatatgcatgtcatcagtaagaaataaaacagcggttacagattcagatgaaattgatttaggacgtcttgtcggagaattgatcgatcatcgtaaattaataatttctgtcacatcgctatttacgttattagcattagtctatgctttatttgcgacaccaatttatcaagcagatgcattagtacaagttgagcaaaaacagggtaatgcattgttaaatagcttgagtcaagtattgcccgatagccaaccacagtcggcgcctgaaattgcattgttacggtcacgaatgattttgggtaagacagttgatgatctgaatctgcaggcaaaaattgaagaaaatcattttcctatatttgggcgaggcttggccaggttattagggaataaagcaaataatatagcaatatctcgtttatacctttcaattcctggggaagatgttccagaagttgaggtccaggttttagataaaaataaatttagcgtaacaggggaaggtattgagctaacaggaacagtcggtcaactacttgaagcgaaaggtatatcgctgctggtgtctgaaatcgatgctgagccgggaactaccttcactgtttcgtatatttcacgtctcaaggcaattacaaatcttcaggataatttgactattgccgatgaaggaaaagatactggtattttaacgttatcccttaccggcgatgatcaaacacaaatcaagaatatcatagatagcattagtactaactacttagcacaaaatatcgcaagacaggctgcgcaagatgcgaaaagtttagagtttctaagtgagcagttacctaaagttcgcagcgatttggatcttgcagaggataaattaaatggttatcgtcaacaaaaagattcagtcgatctttctcttgaagctaaagctgtgctcgatcaaattgttaatgtcgataatcagttaaatgaattaacaatcagggaatccgaagtttctcagctgtttacaaaggagcaccctacctataaagcgttaatggaaaaacgtaaaactcttcaggaggaaaagaacaagctgaataaacgcgtatcagcgatgcctgaaactcagcaagaagtattacgtctaagtcgtgatgttgattctggacgtgcagtgtatatgcaactgctgaatcgacaacaggagttgagtattgcaaaatcaagcgcgatcgggaatgtcagaattattgataatgcgataacgcaacctaagccagtcaaacccaataaagtattagttattctgttgggtatcgtaattgggttactcatttccgtaggcttggtactcgccagagtagttttacgtaaaggaattgagtcgccagagcaactggaagaattagggattaacgtctacgcaagtgttcctgtttcagaagaatttgccaaacgcgtagagcgttctagcaaatggaaaaataagaatcgtgatgaagctgctgtgttcctggcgattgaaaacccagctgatttggctatagaatccattagaggcctacgtacgagcttgcattttgcaatgatggaggcgaggaacaatgtattaatgattactggtgcgagtccaaatgctggtaaaacatttattagctcgaatctcgcagaggtaatcgcacagactggaaaaaaagtactatttatagatgcagacttgagaaaaggatatacgcataaattattcaatacagagaataataatggcttatcggacatattgtcaggtaaatcctcaatagagaaagcggtacaaaagatatcaaaaattggcttcgattatatttcaagaggcatggtgccaccaaatccagctgaattactaatgcataagcgttttggagagttgattgcttgggcgaatgaacactatgatttagttgttatggatacaccgccgattctagccgtgacagatgctgcagtgatcggaaattatgcaggaacaactctattagtggcacgctttgaacaaaatactgctaaagaaatagctgtcagtattaaacgatttgaacagagcggtgtgaatattaaaggttgtatacttaatggtgtggttaagaaggcaagtaactattatggatatggttacaaccattacggctatacatataccgataaataaaaattgaattgaaaaataaaccgaagattaatcttcggtttatttctattgctgtaattgcctaattcaatattataaacagagcgacaagagtctattgtgaggaagttatgagacttattgttaaaaatatcttggtaagtacaacccttgccttgtcagattttcttgggtttattatttcgccatatctggcgatgtttttcttatctatggttctgagtgattatcagcatatcgttcctcctaaggatatagagggatggttaggattacattggttgctcgggttcggttgtgttgcttggtattcagtacgtctgcgtcattatttttatagaaaaacattttggtttgaacttaaagaaattctgaggacgctggcgatttttgcagttattgaaattgcagtcatggcatttacaacgtggtcgttctcaagatatctatgggtgatgtcttggttattgatatttattcttgtacctttatttaggatggtgactaagaaaatattaaatatgactggcctatggatgcgagatacgtggattatcggcaacggaaataatgcttacgaagcttataaagcgataactagtgagcgtaatttgggattgaaaatcgtagggtttgttgaagtgtcaaaacctatggtcacagaaaaatataactttgatgttccaatcattcgggcagatgctgactggctaaatgatattgataaaaaaagtcagtttatcgttgcggtagagaccacagagagcgaagaaaggaatatgtggttacgaaatttcatgattaaaggttatcgatatgtctcggttattcctaccttgcgagggatgccgttagatagcaccgatatgtcatttatttttagccatgaagttatgattttccgcgtacaacagaatttagcaaaatggtcctccaggctcagtaagaggttatttgatatatttggagcactgtcgataattattgttctttcaccgctattaatatacatcagtagaaaagtgaaaaaggacggtggtccatcaatttatggacatgagagaatagggaaaggagggaaaccattcaaatgtttgaaattcagatcgatggtaattaattccaaggaggttcttgaacatttattaaataacgatgctgctgcaaaagaagaatgggataaaacttttaaattaaaaaatgatcctagaataactaaaattggacattttttaagaaaaacaagtcttgacgagttaccacaactgttcaatgttctcaagggagagatgagtcttgttgggccgaggccaataatcactgctgaacttgagcgttataatgatgaggtcgattattatttactcagcaaacctggcatgacaggtctgtggcaggtgagtggtcgtagcgatgtagattatgagactcgtgtatacctcgacgcctggtatgtaaaaaattggtcaatgtggaatgatatagcgatctgaaagatcattatggccatttttgaatagggaataagaaagtgacgaacaaattatcttgttttaaagcctatgatattcgtgggaaacttggctcagaattaaatgaagacattgcttaccgtatcgggcgagcatttggcgagtatttaaagcccaaggaagtggtcctggggggggatgtccgacttaccagtgaaagtttaaaacttgcactggcacaggggttgcaggatgctagtgttgatgtcatcgacattggtcttgctgggactgaggagatatatttcgctaccagttatttagaagttgacggtggtattgaagttactgcgagccataatcctcttgattataatgggatgaaactggtcagggagtcttcgaaaccaattagcggtgatacaggccttcgacatatccaaatacttgcggaagaaaattcttttaaacctgtattatctgattgccgtgggagttataagaagatatcgattcaagaaggcgtatatagataaaatactatcttatatagatttttcgaatttttcaagaccgctcaaattggtattcaattctgggaatggcgcagctggtcatgtaattgacgcgatcgaagaaagattcaaaaataataatttgcctattgatgttatcaaaatacatcaccatcccgatggtaatttccctaatggcattccgaatcctctattacctgaatgtaggcaggatacaattgatgcagtaattgcacatcaagccgatatgggtatagcttttgacggggatttcgataggtgtttcttgtttgacgaaaaaggcaactttatcgaaggatactatattgttggcttattagctcaagcgtttttggaaaaaaaaccaggttcaaaaataattcatgatcctcgtcttagttggaatactattgatttagtttcacaatctggtggtgttcccgttatgtcgaaaactggccatgcgtttatcaaagaacgcatgcgtctcgaagatgctatttatggtggtgaaatgagtgctcaccattattttcgtgatttcttctactgtgacagtggaatgattccttggttattagttgcagaattgctgtgtaacaaaaacaaaagtttaagccaactagtcagtgatagaatgatagcgtatccagcatcaggagaaattaatagttcaattgaaaatcctgcaatggctattgagagagtgctagaacattataagcttgatgctatgaatatagataatactgatggcattagcatcgagtatcctgattggcgtttcaatctccgtagttcaaatactgaaccagtcgtacgtttgaatgtcgaatcaagaggggacagggatttgatggttcaaaagaccaatgaaattctgactatattaagagcttaatatttatagtgagcagatattttctgctcgcttttctattttttttacagcttgggtgttaaaatgtcagatgatattaatatcggtattgtagctgattggttagttacatatgcgggttctgaaaaggttattaaagaattcattgacgtatttccttcatcagaattatattcagttgttgattttttgtcagattcaaatagggaactattttcagggaaaaaggcaaaaaccacttttatacaaaaaatgcctttcgcaaaatccaaataccaaaaatatattcgcatcaacgatcgctgagattatattatttggcactgactcatagtttgccagaagttgttttgtatcttttggtaaacaataaccgccataaccaaatgaaggattattataatggtttccgatgcgcgggtccaaacagactccttcgataatttgcttactatttagcccctggctttcagcataactatcaagctcattaaaatatgccacacgtaaagcaagataagtgttagcaaataatttaatcgcttcagcttccgttgaatcagtaaacaacgtagggatgtcctgcttgatagcgccttctttcagtaggttggcaaaaatttcagcacgctcagaacgttcaccgataacaatacgggatggatgaaggttgtcatataatgcacggccttcgcggagaaattcgggtgagaaaatgacgttatcaatacccaagcgcgccttgatatctcgagtgaagcccaccggaatcgttgacttaatgaccatgactgcatccggattgatttgagtaacatcacgaatgacagtttcaaccgtagatgtattaaagtagtttgttttgggatcgtaatcagtcggtgtggcaataatgacaaaatctgcatcgcggtaagcatcgtgcttatctgttgtggcacgaaaattaagctgtttatccttcagatattcctgtatttctttatcgacgataggtgatatcttctgattaagcatgtcaacttttgcttgtacaatatccagcgcaaccacttcatggtgctgggcgatcagaacaccattcgataacccaacataacctgtacctgaaatagtaattttcattagattacactttaatcagttaactgaacaacggcgtgaaggccgtcctattaatcaacatctttggcgtttttactccgagcctcaggaaaagtcaaggattcagcttaggagcttaaaagaggctaatagatgtctaaatggaaaagacactaactttaacattagtgtctgagaggcggacatttcaaaactcaccagagagatcgacgagtttatattttgaaataaatcggattaatctaaccactcagtgtggaagataccatccttgtctatgcgcttataggtatgagcaccaaaataatcacgctgggcttgaatcaaattagccggcagaactgcagaacggtaactatcgtaataagcaatggccgcagagaaggttggcacagggatgccattttgtactgcataagctactacatcacgtagtgcttgttgatattcatcagaaatttgcttgaagtaaggggctaacagtaaattcgcaattttggcattctgctcatatgcatcagttattttttgcagaaattgagcccggatgatgcaaccagcgcggaagattttagcaatttcgccataattcagatcccagtggtattcatttgatgccgcgcgtaattgagaaaaaccttgagcataagagacaattttacccaaatacagagctcgacggaccttctctataaattccactttattttctgctgatttaacatgagggcctgtcagaacttttgaagcagcaacacgctgctccttcagagaggaaatataacgagcaaatactgattctgttatcaatgacaatggctcgcccaagtctaacgaactctgactagtccacttcccagttcctttattggcagcttcatcaagtattacatcaataagatacttaccatcttcatcttttttagtgaagatatctttggttatatcgattagatagctactaagctccccttcattccactcagtgaagatttccgccaactcgtcgttggaaagcgcaaggccacctttcagcagagcatacgcttcagcaatgagttgcatatcaccatactcaatgccgttatggaccatttttacgtagtggcctgcgccatcagcaccaatgtatgccacacagggttcaccgtcatccgcacgagcagcaatctgttccaggattggagcaacgagttgataagcttctttttgcccaccaggcatgattgatggacctttcagcgccccttcctcaccaccagatacgcctgtaccgatgaaattaaaacctgatgcagaaagttcgcgattccgacgaatagtatcctggaagaaagtattgccaccatcaatgatgatgtcacctttttcaagataaggcttaagagagtcgatagcgctatcggtgccagcaccagcctttaccatcaacaggatgcggcgtggcgtttcaagagattcaacaaagtctttaactgtataataaggaaccagttttttgccgggattctctgcaatcacctcttcagttttttcacgggagcggttgaatacggagacggtgtagccgcgactttcaatattgagcgcgagattgcggcccatcacagccataccgacaaccccgatctgttgcttggacattacatactcctgtctggtgtgttaactgtgataattcacagattaagtatccctatatagtacggcatacctaaattgtgtggtagttgaaatgtgctagataggtgctttattgcccatcacagctaataggagaggatttactgaatttattggtcagagctgcagcaataggtaactcattaagtttaagacatttagccgaagctttttcagattcattatgcataagaataccgaaattagattcacgattggagctattatcagcactattcataagggtataccaccatacgcccttaatgtaatctctttccttagcaagaagagtgtatttgatcatatattgggcagcaacaatagggtcaaccccaccgctttttttgttagtgggataaccaatttcagtaatatagaggtcaatatccttaccagtcttacttttaatgtgtttatcatagcgatcaagagcagctaaattgccttcaggtgttctcaactcggtatttttattaccatatgagtacgcatgcactgaaatgccatcaatatattgcagtactcccaggtcaataatatgatcaaaccatgcaacttcttgagttttcaaaggattaaagcttccggcgattacttttgcatcagggtcaatacgtttaatcgcttccgaagtagcttttattaatttaaagtaggttgtatcatcaggctttgctttttttaaaaaccaagaactaataccagtaccaagataccactcattccaaacttcatagtagcgaacttttcctttataacgattagctacccaagcagcataagaagcaaacttctctatctgctgatcgttagcaggaaatccgcctttggtatggagattattaccataatccaaaacgagtaaagcactaacattatttgactgtaattttttgaagtagtgatcggttttagttcggttttctggaatgctaaaaacgccatcttgcttctcaagatcattccaatacaattcatcacgaactgagttaaaaccatatgatttaactttattgatataaaaatcagaactttctttatagtttgctatatgggtaccgataccaaattcaaatgcactagcattagaaatattgcatgcagctagaagcaaaaataaataaggatacgttttatgctttgaaagtgatggcataatctggcctttataatcaaacagttctagacaaggtattgccaacaagattaagttaacaataccagaaactacttggtttcattaaatttagtccatttatctcgaatatatgtattaatttcagtcctgaatctttcttcagaaaatttttcagcattacgcctacactcagttggttcaaaaaggtcttgcatgctttcaaatttatttacactttctataattgaccctggttcctgcttatcaaaaaaaactcccgtaggattctgattaccttcaggaataatcgtttctagcaccccaccttttccaaaagcaatgactggtgtaccacatgcctgggcctcaacaggtgtaatcccaaagtcttcttcagctgcgaaaacaaatgccttagcattttgcatatgcttttgcattatattgttcggttggtaaccaagaatttcaatatttcctttggctttggactttatcttatccatctctgagccatcacctactacaaccagtttcttttcaggcatttcgttgaatgcatcaacaatgagatcgattctcttataaggtactaatctcgaagctgtaaagtaatagttgtccttgttttcattaagggtgaagttatttacatctacaggtggatatatgacatcagaggagcgtccgtataccttatgaatgcgtcttgaaataaattttgaatttgcaataaaatgatcaacaccattcgctgtacgataatcccaaattctaattttatgcagtaaatactttgcaataaatcccttcaaaccttcagacagaccagactctctaagatattgatgctgtaaatcccaagcataacgaattggcgaatgaacgtaacttatatgcaattgatcaggcccagtcaagatgccttttgcaacagcatggctactagataaaattacatcatgacctgacatatcgagttgttcgattgccaatggcatcaaaggtaaagaactcgcaaagattttatcgcggattctattttagcacgcaagccaaaagtcgttggcgtatatcgccttataatgaagagtggttcagataatttccgtgcatcctctattcaagggatcatgaagcggattaaagcaaagggaattcctgttattatatatgagccagtgatggaagaagacgaattttttaattctaaagttgtaagagatttagatacattcaaaaatgaatctgatgtgattatttctaatcgcatggcggatgagctttctgatgttacagaaaaagtttatacgcgcgatctttttggtaatgattgataggtttttatggctggttttattattgccagccgattattttttctgtcattattcaaagcatttttgtgatttctcgtagttttatatgtgaaagtaattgtaatattttgtgctttatattgttggtacattaaatgaggttggattatgaaatatttagtgactggtgccggcggatttatcggatttcatgttagtcaacgtcttttaaaagatggccatcatgtagtagggattgataatcttaacgattattacgatgtaagtctcaagcaagcacgtttgaatctcttacaatcttctttgttcacttttcataaaatggatcttgccgatcgtcctcaaatggaacagctttttgtttctgagaaatttgaccgcgttattcaccttgctgctcaggcaggcgtccgttattctcttgaaaatcctcatgcttatgcagactcaaacctcatgggcttcctgaacattctagaaggttgtcgccataataaggttcagcacctgatctatgcgtcctcaagttctgtttatggattgaaccgtaaaatgccgttctcgaccgatgattcagttgatcatcctgtatcactctatgcggcaacaaagaaagccaatgaactgatggctcatacctacgcacatctctacgggattccaactactggtcttcgtttctttactgtttatgggccatggggccgtccagatatggcgttatttaaatttactaaggccatgttggaaggaggcagtattgatgtttacaatcatggcaagatgaaacgcgacttcacttatattgatgatattgttgaggctattattcgtttgcagaatgtcgttccacagcctgatcctgactggactgtcgagagcggctctcctgcgaccagttctgcaccatatcgcgtttataatattggtaatagttcaccagttgaattaatggactacattacagcactggaagatgctttaggtatcgaagctaagaaaaatatgatgccgatgcaacctggcgatgttatggaaacaagtgctgatactgccgatttatataatacgattgactttaaaccagagacttctgtgcgtaaaggcgttgaaaactttgtgtgctggtataagaaatattatcaatattgatgttttttttgctttcacctcgcctgttttacttagtgtcgagttattgtgagcatattataggtgatcgcttatgtggtcaccttactacatattaaaataatgattctttttgttaactttgaattcttttgctccatttagaaatatgtaatttagttccttgcaaatatccaactgtaccaagttatctatcaggtacattttatactatacccatctgttcttgatattccgatagaattctgccggagtcttgtcattcaatcatgattacccatcacatgattatatattttttacctcagtggtcgagcctgttctgtgtatatttagactatagggacgagagcatagtcagaagtacaacaggaaggttattgctaaattaatcactatacgagttatctgtctgtattgcgaggcgggagaacgcaatcacgacgatgtcttcttatgccattaaccctgccttcttaagataaactcaccctcttaaccgtgtaatgtacatatctttgtacgctcatcctgcaccaatagtgtttccaatatcctcattcttcacttttttcctttctggatcgctcggtattctcgactaaagtatccacggtagtttgactgtctgttaaaaagactgtttgaccgaaaatcctactgagtacttatcgatgcgtgtcaagtttggaggttggtgactgcattacgtactaataagttgtcctgattctgtcctcgtagccaacccggtgagttttcagattgcattcgtttcctcgaggtcatgaatgtgcaggcacccgtagggtacacaccctgtcggtgcttacacggcatgtctcctgtgtaaaatgccctacctgaccgactccttaagaatttcataattttgattgtaatacctctggtcacatctttatattcctacttagttagcggtaagcatctatcatctacgatttcatccttcgccttgttgcaattcctggagttcagtcactctcatactggtcaatttttacttgtagttgtaaaaagcggcctcatatgaccttcctcgtgtaaccgtcacctcgcggggtcctacatcttatccatagggggttacgcaattgtttttactttgtattgattgcgaagataaactacaaaaaacatctttatctaacgcttcgttatcaaataataaggtgacagattgtaaaaggtttaacgatttgtttgcatgaattatagagagccaatacctgacgtaccataccagaggacttgtccaagacaaacctttttaaacgattatatttaaaccaaattagactggctttttatgtctttttctataaatatcagttagttggttgcgtttttgtttgctgctatcatgtttcattcgagtaaactcttaatcggtaggcttttttatttttattctatgcgtccagcgctataatctgctgacgtttttttgggaagtgtagcgcagaggcatgtttcgtttatctcactttttagatcatagcgcagtgctagtgcggacaggaaatgctaaccagagtcagtgtcgtcttttccgttgcaaaaacatgctatgcctcttcttggttcatcttgtaactcttcttcttgatggtatgtgagcaaatatgtatttctttacgcaccgatgataaccaggcgtgccttagactgcttacaggcgtgccttcgactgattaaatgagacaaacccgatggttgcaccctctgtaaatgcggaaagtatgcgttgttttctttcagatgagtacgctatagatgctaagaaccgagatatgctttcaggcatagctctgttcttaggtttttagaggattcttatccgtagaaaccatcttttgtcgcttccttaattacaccttttgccagaagcgtttgagacctacatagagcctgcactgatgtattacgcattttggttgcgatagccaatggcggtagcgtgctttaacaaaaggtttgttcttaacggttaattaatagtaaaagcttttttatttaaggatttcaatatgttacttcctgtagttatggctggtggtaccggcagtcgtctctggccgatgtcccgcgagctttatccaaaacagttcctccgcctgtttgggcagaactctatgttgcaggaaaccatcacccgactctcgggccttgaaatctatgaaccgatggtcatctgtaacgaagaacaccgctttctggtggccgaacagttgcgtcagctcaacaagctgtcgaacaacattattctcgagccggtcgggcgcaacaccgccccggccatcgccctggcggcccttcaggccacccgccaaggagatgatccgctgatgctggtgctcgctgccgaccatatcatcaataaccagccggtcttccacgacgccattcgcgtcgccgagcagtatgccgatgcaggccatctggtcaccttcggtatcgtgccgaacgccccggaaaccggttatggctacatccagcgcggcgtggcgctctccgacagcgcccacaccccgtaccaggtggcccgcttcgtggagaaaccggatcgcgagcgtgctgaagcctaccttgcctccggggagtactactggaacagcggcatgtttatgttccgcgccaaaaaatatctctccgagctggccaaattccgcccggatatcctggaagcctgccaggccgcggtgaatgccgccgataacggcagtgacttcatcagtatcccgcatgacattttctgcgagtgcccggacgagtccgtggactacgcggtgatggagaaaaccgccgacgcggtggtggtcggtctcgatgccgactggagcgacgtcggctcctggtccgccctgtgggaggtcagcccgaaagacgagcagggcaatgtcctcagtggcgacgcgtgggtgcacaacagcgaaaactgctacatcaacagcgacgagaagctggtggcggccattggcgtggagaacctggtgattgtcagcaccaaggacgcggtgctggtgatgaaccgcgagcgttcccaggatgtgaagaaggcggtcgagttcctcaagcagaaccagcgcagcgagtataagcgtcaccgcgagatttaccgcccctggggccgctgcgacgtggtggtccagactccgcgcttcaacgtcaaccgcatcacggtgaaaccgggaggcgccttctcgatgcagatgcatcaccaccgcgccgagcactgggtgatcctcgccggtaccgggcaggtgacggttaacggcaagcagttcctgctgaccgagaaccagtccacctttattcccattggcgctgagcacagcctggaaaacccgggccgtattccactggaagtgctggagatccagtcggggtcttacctcggcgaggacgacattattcgtattaaagaccagtatggtcgttgctaatttttttcggggtaaaacgcagaatgacacagttaacatgctttaaggcttatgacatccgtggtgaactgggcgaagagctgaacgaggatatcgcctaccgtatcggccgcgcctacggcgaatttctgaaacccgggaagatagtggtggggggcgatgtgcgcctcaccagcgagtcactgaagctggcgctggcccgagggctgatggacgccggcaccgacgtgctggatatcggcctgagcggtaccgaagagatctactttgccaccttccacctcggggtggacggcggtatcgaggtgaccgcgagccacaacccgatgaactacaacggcatgaaactggtgcgcgagaacgcgaagcccatcagcggcgataccgggctgcgcgatattcagcgcctggcggaggaaaaccagttcccgccggtggatccggcacgtcgcgggaccctgcgccagatttcggtgctgaaggagtacgttgaccacctgatgggctacgtggacctggcgaacttcacccgtccgctgaagctggtagtgaactctggcaacggggcggcggggcatgtgattgatgaggtggagaaacgcttcgcggcggccggggcgccggtgacctttatcaaggtgcatcaccagccggacggccatttcccgaacggtatcccgaacccgctgctgccggagtgccgtcaggacaccgccgacacggtgcgcgcgcatcaggcggatatggggattgcctttgacggcgacttcgaccgctgcttcctgttcgatgacgaggcgtcgtttatcgaggggtactacattgtcggcctgctggcggaagcgttcctgcagaagcagccgggggcgaaaatcattcacgacccgcgcctgacgtggaacacggtggacattgtgacccatagtggcggccagccggtgatgtcgaagaccgggcatgcgttcatcaaggagcggatgcgccaagaagacgccatctacggcggtgagatgagtgcgcaccactacttccgcgacttcgcctactgcgacagcgggatgatcccgtggctgctggtggcggagctgctgtgcctgaaaaacagttcgctgaaatcgctggtggcggaccgccaggcggcgttcccggcgtcgggagagatcaaccgcaagctggggaatgcggcggaagcgattgcccgcatccgggcgcagtatgaaccggcggccatcgacatcgacacaacggatgggatcagtattgaatatcctgagtggcgctttaacctgcgcacgtccaacacggagccggtggtgcgtctgaacgttgagtccagagcggatactgcgttaatgaatgagaaaacgaccgagctgttacacctgttaagcggggaataaggtgagagatttactaacgacgatttatcgttatcggggatttatctggagcagtgttaagcgtgattttcaggcacgctatcaaaccagtatgttgggagcgttatggctcgttttacaaccgctctctatgatcttggtttataccttggtcttttccgaggtgatgaaggccagaatgcccgacaacaccgggccgtttgcctatagtatttatctctgttcaggggtgctaacctgggggctatttacagagatgctggataaaggtcagagcgtattcattaataatgctaatttgatcaagaaactaagttttccgaaaatttgtctgccgatcatcgtgacgttatcagcagtgcttaatttcgcgattattttcagcctgtttctgatctttatcattgtcactggtaacttccctggctggctgtttttctcagtgataccggttctgcttttgcagcttctgtttgccggtgggctgggtatgatcctcggagtgatgaatgtctttttccgggatgtggggcaactggttggagttgcactgcaattttggttttggttcactcccattgtttatgtactgaattcattaccggcatgggcgaaaaatctgctgctctataatccgatgactcgagtcatgcaatcttatcagtccatcttcgcctaccatcaggcgcctaactggtattcgctatggccagtattggctctcgccattattttctgtgtcatcggttttaggatgttccgcaaacatgcggcagatatggtggatgaattataatgagttatatcagagtaaagaatgtcggtaaggcttatcgccagtatcattcaaagaccgggagactgatcgaatggttatcccctcttaatactaaacgccataatctgaaatggatcctcagcgacattaattttgaagtggctccaggcgaggccgtcggtattatcggtatcaacggtgcgggcaaaagtaccctgctaaaactcattaccgggacttccaggcctacgaccggagaaattgaaatctctgggcgtgtcgctgcattactcgaactggggatggggtttcattctgatttcactggccggcagaatgtttatatgtctgggcaactgctggggttatcctctgaaaaaataactgaactgatgccgcaaattgaagagtttgcggagattggtgactatatcgatcagcctgttcgtgtctattccagtggtatgcaggttcgattagctttcagcgtagcgacggctatccgtcccgatgtgctaattatcgatgaagcattatctgttggggatgcgtatttccagcataaaagctttgagcgtatccgaaaatttcgtcaggaaggtaccacacttttgctggtgtcccatgataaacaggcgatacaaagcatttgcgaccgggccattttgttgaataaaggccacattgagatggaaggcgaacctgaagcagtgatggattattacaatgcgcttctggccgataagcaaaatcagtccattaaacaagttgagcacaatggtaaaacgcaaactgtttcaggcactggtgaagtgactatctctgaggttcatcttcttgatgaacagggtaatgtgactgaatttgcctcagtagggcatcgtgttagcttgcaggtcaacgttgaggtcaaggacaatattcctgagcttgtcgtcggatatatgattaaggatcgactagggcagccgatttttgggaccaatacgcatcatctcaaacagacgctcatctccctgaagaaaggagaaaagcgttcgttcttattctctttcgatgcgagattgggggttggatcctattctgtcgctgttgcgttgcatacttccagtacgcacctcggcaaaaactatgaatggcgcgatctggccgtggtattcaacgtcgttaacacggaacaacaagagtttgtcggcgtgtcctggttgccacctgaactggagatttcttaatgggttcgtcgttttatcgttcatttgaagaacgacacagaggttcggttgaagatatcaagagccgcctgagtttttatttaccttttctctcacgtctgaaggaaatttatcctgatggcgtgattgcggatattggttgcgggcgtggcgaatggctggagatcctgactgaaaatggcattgcgaacatcggcgtcgatctcgatgatggcatgctagcgcgtgcccaggaagccgggctgaatgtgcagaaaatggattgtctgcagtttctgcaaaatcaggcggatcagagcctgatagcgttgaccggttttcatattgcagagcatttgccttttgaggtactgcagcagctcgtcatacataccttgcgggtgctgaaacctggtggtttactaatccttgaaacgccgaatccggagaatgtaagcgtcggcacctgttcattttatatggacccaacgcataatcaccctctgccgccaccactgcttgagtttttacctattcattatggttttagccgggcaattaccgttcgtctccaggaaaaggaggctcttaaatctccggatgccgccgtcaatttggtcgatgtacttaaaggggttagcccggactacagcatcattgctcagaaaaccgcgtctgaagatattcttgaacgctttgaaatcctgtttacccaacagtacggcctgacgctagatgccctgagcaaccgttacgatgagattttgcgcaaacagttttcgtcctatgcctcacggctggagacgttgaaccatacctatacgcgccagataagcaaaatgtcggagactattcagacgttgcaaggtcaggttgacgaactgagccatgtcatcggtcagaatcatcagcttcatcagcaaatggcggacttacataacagtcgttcatggcgtatcactcaaccactacgctggttatctttgcaacgtcaattattacgtcaggaaggggcgaaagtgagagcccgtagggcggtgaaaaaaatattgcgcaaaggaatggcgctctcgctggtctttttccatcgctatcctaagtcaaaggtttatctgtttaaggttttgagaaaaacaggctgctacacattgctacaaagtttgttccagcgggtcatgctggtgcactctgacacgatgatgatgcagtccagaagatatgatgtggatactgatgaaatgacaagtcgcgcgttgagtatttataacgaactaaaaaataaaaatacggagaaataacgatgcgtattgtcatagatttacaaggtgcgcagacagaaagccgctttcgtggcatcggtcgttatagtattgctatcgccaaagctataatcagaaataacatacagcatgagattttcatcgcactatccgccatgctggatgagtcgattgcggatattaaggtgcaatttgccgatctcctgccagctgaaaatatagtcgtctggcatgccgcaggccctgtgcgagcgatggaccaaggtaatgaatggcgtcgggagagtgcggaattgattcgggaagcgtttcttgaatcattgcgtccggatgtcgttttcattacgagcttgtttgaaggtcatgtcgacgatgcggccacatcggtacacaaatttagtcgtcagtataaagtagccgtgctgcaccacgatcttatccccctggtgcaggcggagacctatctcctggacgatgtattcaaaccctactatttgcagaaagttgaatggttaaaaaacgctgaccttttattgaccaactcagcttataccgctcaggaagcgatcgagcatctacatttgcagggcgatcatgtacagaatattgcagccgcagccgaccctcagttttgtatggcggaggtgacaacgagcgaaaaagagactgtccttggccattacagtattcagcgcgagttcgtgttgtatgcgcctggtggatttgactcaaggaaaaactttaaacggttaattgaggcctatgccgggctcagtgatgccttacgtcgcactcatcaactggttatcgtcagtaaactttccattggcgatcgtcaatatctggaatccctggcatcaggtaatggtttacagcagggcgaactagtactgactggttatgtgccggaacatgagctgatccagctctatcgcctgtgtaaactgttcatctttgcttctctacatgaaggttttgggctgcctgttctggaagcaatgtcgtgcggtgcgccggccgttggctcaaatgtcacaagtattcctgaagtcatcggtaatcctgaagcattattcgacccatattctgtctcttccattcgagaaaagatcgcgcaatgtttgactgatgatgcattcctggcgcgtctgaaagaaatggcgcagcagcaagcgcgtaatttctcttgggataaagcagcggtgactgctctggaagctttcgagaagattgcgacagaatacactggtatcgcgcaggttttgcctgaagcattgattcagaagatccttgctatttctcatgggcaaccagatgagcgcgatctgcgcttgtgcgcaacggccattgattacaatctgaagacggctgaactttatcaaattgacgataaggcgctgacctggcgtgtggaaggtccattcgatagctcatatagtctggcgctcgtcaaccgggaatttgcccgggcactctcagccgatggcgtagaggtgttattgcactccactgaaggaccgggggattttgagccggatgcctcgtttatggcacagccgaaaaataacgatctcttggcattttataatcaatgccgtacccgcatgagtaacgaaaagatagatattcttagcagaaatatctatccaccgcgggtttcggaaatggatgccaaagtaaaactccttcactgttatgcctgggaagaaacgggatttccacagccatggatcaatgaatttaaccgggaacttgacggagtgctgtgtacttcggaacatgttcgtaaactattgattgataatgggctgaatgtgcccgcattcgttgtcgggaatggctgcgaccattggctcaatacctcggccgaaacgacaaaaaatgtggatgacggaaccttccgtttcctgcatgtctcttcgtgtttcccacgcaaaggggtacaggcaatgcttcaggcctgggggagggcattcactcgtcgtgacaatgtcatcttgatcattaagacatttaacaatccgcacaatgaaattgacgcgtggctggctcacgctcaggctcaattcgcggaatatcccaaagttgaagtgatcaaagaagatatgtctgccagccagcttaaggggctttatgagagctgcgatgttttggttgctccaggttgcgccgaaggctttggcttacctatcgctgaagcaatgcttagtgggctaccggccatcgtcaccaactggagcgggcaacttgattttgttaattcacaaaattcatggctggttgattatcattttactcgggtaaaaacgcactttggtctgttttcctcaacctgggccagtgtggacattgacaacttaacggatgcgttaaaagcggcagtctcgaccgataaatcagtgctgcgtggcatggccgcttctggacgcgagcttattctgcagcagtttacctggaaagctgtggccgatcgttcttgtcaggcggtcaagactctgcgcgcgcatattgatattgctcagcatcgggcgcgtattggctggttgacgacctggaacacgaaatgtgggatcgcaacctattcccagcatctggtggagaatgcaccgcatggcgcggatgttatttttgctccacaggtcaatgctgaagatcttgtgtgtgcagacgaagagtttgtactgcgcaactggattgtaggtaaagagaataactatctggaaaacctccagccacaaattgatgccctgcgacttaatgtaatcgtgatccagttcaattatggattctttaatcatcgcgaactgtcggcctttattcgtcgccagcatgacgccggtcgttcagttgtcatgacgatgcactcaactgtggatccgcaggaaaaagagccgacctggaatttccgtcttgccgaaatggcggatgccctggcgctttgtgaccgattgttggtgcattcaattgccgatatgaaccgccttaaaggtttaggcctaaccgataatgttgctttattcccgcacggtgttatcaactacgctgctgggagcgccgcgcgtcaacagcaggctttaccgttaatcgcgagctatggcttctgcttaccgcataagggcctgatggagctggtagaatccgtccatcgcctcaagcaggccgggaaaccggttcgtttgcgtctggttaacgcggagtatccggttggagaatcacgcgatctggtggcagaacttaaagcgttagctcagcggctaggagttaccgacctcattgagatgcataatgatttcctgccggatgcggaaagtttgcggctgctctcggaagctgaccttctgatttttgcttatcagaataccggggagtctgctagcggggcggtacgatatggtatggcgactcaaaaacctgtcgcggttacgcccttggcaatatttgatgatttggacgatgcagtctttaaatttgatggatgcagcgtcgatgatatcagtcagggaattgaccggatcctgcattccatccatgaacaggacgcctgggcgactaggactcaacaacgtgccgatgcatggcgggaacaacatgattattatgctgtttcacgccgcctggttaatatgtgtcaaggcttagctaaagctaaatattttaaataaaaatattcccccttgtattttttgcctttgaatacaaggggagctagatgatgatgtgtcatttattatgaaaattatttttgctactgagccaattaaatacccattaacgggcatcggtcggtattccctggagctggttaagcggctggcggttgcccgtgaaatcgaagagctgaagctgtttcacggcgcgtcgtttatcgatcagatcccccaggtggagaataaaagcgataccaaagccagcaatcatggtcgtctgtcggcgtttctgcgtcgccagccgctgctgattgaggcgtatcgcctgctgcatccgcggcgccaggcgtgggcattgcgcgattacaaagactacatttaccatggtcccaatttctatctgccgcatcgcctggaacgcgctgtgaccacgtttcatgacatctctatatttacctgcccggaatatcatccaaaagatcgggttcgctatatggagaagtccctgcacgagagcctggattcggcgaagctgatcctgaccgtctccgacttctcgcgcagtgaaatcatccgcctgttcaactatccggcagagcggatcgtcaccaccaagctggcctgcagcagcgactatattacgcgcagcccggcggagtgcctgccggcactgcaaaaatatcagttgtcatggcaggggtatgcgttatatatcggcaccatggagccgcgtaaaaatatccgcggtctgctgcaggcctatcagctgctgccgatggagactcgcatgcgctacccgctgatccttagcggttatcgcggatgggaagacgatgtgctgtggcagttagtcgagcgcggtacgcgagaagggtggatccgttacctgggctatgtcccggatgaggacctgccttatctgtacgcggcggccagaacctttgtttatccctccttctatgagggattcggtttacctattcttgaagcgatgtcttgcggtgtgccggtagtatgttcaaatgtcacttctttgcctgaggtggttggcgatgccggcctcgttgccgatcctaatgatgtagacgcgattagcgcgcatattttgcagagcctgcaggatgatagctggcgggaaatcgccaccgcgcgcggtcttgcccaggcgaaacagttttcgtgggagaactgtacgacccagaccattaacgcctataaattactctaagggtgtcagttgagagttctacacgtctataagacctactatcccgatacctacggcggtattgagcaggtcatttatcagctaagtcaaggctgcgcccgccggggaatcgcagccgatgtttttacttttagcccggacaaagagacaggtcccgtcgactacgaagaccatcgggtcatttataataagcagctttttgaaattgcctccacgccgttttcgttgaaagcgttaaagcgttttaagcagattaaagatgactacgacatcatcaactaccattttccgtttcctttcatggatatgctgcatctctcggcgcggcctgacgccagaacggtggtgacctatcactctgatattgttaaacaaaaaaggttaatgaagttgtaccagccgctacagcagcgattcctcgccagcgtagactgcattgttgcctcgtcgccaaactacgtggcctccagccagaccctgaaaaaatatcaggataaaacggtagtgatcccgtttgatctggacagcatgacgtgcagcacgatccgcagagggttgcgtactggcgggaaaccgtcggcgataatttcttcctcttcgtcggtgctttccgctactacaaagggctgcacattctgctggatgcagccgagcatagccggctgccggtggtgatcgtcgggggcgggccgctcgaggcggaagtgcgtcgtgaagcgcagcagcgcgggctgagcaatgtggtgtttaccggcatgcttaacgacgaagataaatacattcttttccagctctgtcgtggcgtggtattcccatcgcatctgcgctctgaggcgtttggcattacgttgctggaaggcgcacgttttgccagaccgctgatctcctgtgagatcggcaccgggacctcattcattaaccaggacaaagtgaatggatgcgtgatcccgccgaatgatagtcaggcactggtggaggcgatgaatgagctctggcataacgatgagaccgctagccgctatggcgaaaactcgcgtcgtcgcttcgaagagatgtttactgccgaccatatgattgacgcttacgtcaatctctacactacgctcttgaatcgatatcttcttataactcccacggcaatcagataatacaggtttaaaagaattttcttccgcaagtatttggatatgtcgaaggcctgtatcaccgctaattggtttcgaagactccctgaccagtttcatcccattataatcaagaggattatggctcgcagtaacttcaataccaccgtcaacttctaaataactggtagcgaaatatatctcctcagtcccagcaagaccaatgtcgatgacatcaacactagcatcctgcaacccctgtgccagtgcaagttttaaactttcactggtaagtcggacatccccccccaggaccacttccttgggctttaaatactcgccaaatgctcgcccgatacggtaagcaatgtcttcatttaattctgagccaagtttcccacgaatatcataggctttaaaacaagataatttgttcgtcactttcttattccctattcaaaaatggccataatgatctttcactggaaaggaaaccctgagaccagctacccccgccgttgcggcgggggtcaatgcgttagtgccgactcttcagattatcaatcacttcccctaaattcagcccctggtcctgcaacagcaccagcaggtgatacatcaggtctgacgcttcattcttcagttcaaacttatcgttaaccgtcgcggccagcgcggtctccacgccttcttctcccactttctgcgcaatacgtttggtgccgctggcatacagtttcgcagtgtatgagctctccgggtcggcatgcttgcgctcggccagcagttgttccagttgatagaggaacaaccactggtgtccggtttccccgaagcagcttgacgtccctttgtggcaggtcgggcctatcgggttgaccaatactagcaaggtatcgttatcgcaatccggggtgatgctgaccacattaagaaagttgccggaggtttcaccctttgtccacaggcgctgtttggtgcgcgagtagaaggtcactttgccgctttcttgcgttttcgccagcgcgtcctcattcatatatcccagcattaacacttcgccagattcagcgtgctgtatgatggccggcatcatgccgtcggttttttgccaatccagctgttcactcaacataccctgatctccacgccctgggctgccaggaacgtttttaattcgccaatattaataatctgtttatggaacacggaagcggcgagggcgccatcgacgttggcgtcgcggaaggcctcaaggaagtgctccatagttccggcgccgccggaggcaatcaacggaacgttacacacttcacggacctttctgagctgatccagatcgtaaccgttgcgcacgccgtcctggttcatcatgttgaggacgatttctcccgctccgcgtttttgtacttcctgcacccaatccagcgtctcccattgggtgacgcgagtccggctctcatcgccggtgtactgattaacgtgatatttaccggtttgttcatcaaaccaggtatcgatacctaccacgatgcactgcacgccaaagcgatcggcgagacgggtgattaacgtcggatccgcaagcgcaggcgagttaattgaaattttgtcggcgccgaaggagaggatctgcgctgcgtcttccagagacttaatcccgcccgcgacgcagaatggaatatcaatcacttccgccacgcgcgaaacccaacttttatcgactacccggccatcgctggaggcggtgatatcgtagaacaccagctcatccgcgccttcatcggcatagcgttttgccagcggcacaatatcgccgataatttcatgattgcggaactgtacgcctttcactacctggccgtcgcggacgtcaaggcaggggattatccgttttgccagcattggatagcctccgttacgttgaatttaccttccagcagcgcgcggccgacgatcacgccgcgaacgccggttccgcgcagcgcggcaatatcgttgagaccgccgatcccaccggaagactggaacgccacctgcggataacgtgcgcagacttcttcatacagtgagacgttggaacccgcgagagtgccatcgcgggagatatcggtacacagcacatgttgcaagccgaccggcagatagctttccactagctcttccagagtgacgccagagttttcctgccagccgctcaccgccacctgtttattgccatcggcatcaatgcgtacgtccagcgccagtaccagatgttcggggccaaagcgtttaaaccaggctttgaccacctccggcgattttaccgccgttgaaccgaccaccacgcgcgccacgccggcgtcaagcagtgcggcaacgtcttcttctgtacgtacgccgccgccgacctgtaccggtaccgtaacgccggcgactaaggtcttaagcagcggaatctggcgttttgccggatcttttgctccggtcagatcgaccaggtgcaatacttccgcgccctggtctgcataggattgcaggcgtggtaacggatcgttgccatagtcgcgttgctggccgtagtcgccctgatgcaggcgcaccacggtaccgtcaattaaatctaaagctggaatgatcattacatctccaggaaatttttcagcagctgcgcaccggcgctacctgagcgctcagggtggaactgtacgccaaagaagttatctttctgcaccgctgcggtgaaggcctcgccgtagttgcattgcgcgatagtgtacggattgaccggcatggcgtagctatggacgaaatagaaataagcgccttcttcaatgccgcggaacaggcgatcgccggctttggcatacacccggttccatcccatatgcggcagcggcagtccgtgatcggtcattttcggcacctcttcatcaataatgcccagcagctcgacgccgtttgtctcttcgctacggctcccgagtaactgcatgccaagacagatccccagcaccggctgggtacaagctttaataagatcaatgagctcacgttcgcgcagctgatccatcgcagcctgcgcggtgccgacgccgggcagaaaaagtttatcggcgcgtagaacaacatccggctcgcggctgaccactggctcatagccatggcggctcaccgcagatttcaccgagttgaggttggcgcacccggtatcgaggatcaccacgttcatcacaataccccttttgacgatggcaacgtgtcgccctggacccgaatggcctggcgcagcgtacgaccgaaggctttgaacaggctctcgacgcggtgatgatcgtttttacctttggttttcaggtgcagtgtcaccgccatggtataggagagcgagcggaagaagtgttcgaccatctcggtgctcaggtcgccaacgcgctgataggtgaagtcagctttatattcgaggtgcggacggccagagatatccagcgcgcaccgcgccaggcactcatccatcggcagcacaaagccaaagcggttaatgccgcgcttatcacccagcgccagcttcaacgcttcgcctaacgccaggccggtatcttctacggtgtggtgatcgtcgatgtaaagatcgccgccgacgttaatttccaggcgaaagccgccgtgggtggcgatctgatcgagcatgtgatcgaagaaaccaacgccggtgtggatcttactgccgccttcacggtccagccagactttaacgtcaacctgggtctctttggtgatgcgctcaacgtgagcatagcggtcgcgacgggtcagctgttcgcagatggtcggccagttcagcgtttcactgttatagcgcaggccggtgatacccatgttatccgccaactcgatatcggtggcgcgatcgccgatgacgtaactgtgggctttatccatcacgccgtcttccagccacggcaataccaactgggttttcggcttacggcagtcacagttatcgccaggcatgtgcgggcagatcaggacgtcttcgaagttaacgccctgcgaggagaagacctgcatcatcaggttgtgcgggccgtcgaattcctcctgcggaaggctttcggtaccaaggccgtcctggttggtgatcatcaccagcttgtaaccttcctgctgtagcttaagcagcgccgggatcacctgcggctcgaaggccagtttttcaaaccggtctacctgaaaatcaaccggcggttcagagataagcgtaccgtcacggtcaataaagagaaacttctgggtcatacattctccgcagtcaaagcgtcaatcacgcgctggctctctgcacgggtaccgatagtgatacgcaaacagccgcttaatgagggttgtttattttggtcacgtaagataatgccctgatcccacaaagatttaaacaccgcgctggaggcggttatccgcgccagcaggtagttggtctcggaatcgaacacctgttcgacgcaggcgatctcgcgcagcgcatcgaccaggtaagcgcgttcatcaaggatctgcgctactcgcgcgcgcatagcggcaattcctgccgggctcaacgcctgggcggcgatatcggcaaccggcgtcgagagcggataaggtgcgatgacttttagcagtacattaattacctctgcgttagccagcgtaaaaccgcagcgcaaccccgccagcgcaaaggctttcgataaggtgcgcaggataaccaggtgcgggtattcatttagccaaccggcgagcgacgcctgcggacagaactcaatataggcttcatccgctaccacgatcgctttaccgcgcgtcatttccagcagggcgcggaaatcttgcgggttgataatctgcccggtcggattattcgggctgcagacaaacactactttcacgccggtgagatttgcttcgatacccggtaaatcaaggtgccagtcggcgagcgtcggcaccgtgcggcactcaacgccgatggtttcggcgctgacgctatacatgccgtaggtaggtgggcaataaaggaccgcgtcctcaccgggttcgcaaaaagcgcggatcaataactcgataccttcgtcagccccgcggctcaccagtacctgctctggtgttacgccggcatattgcgcgtagttttcgataaccgctttcggctgcggctccggatagcggttcagcgtctgttcggttaactggaattccacggcggtggggaattcgttggcgttcagccacacgtcgccttttcccccaagacggcgggcggattgatacggcgtcagcgcgcggatattggcgcgggctaagtcttcaatgctcatgcttgctccttaagggcggccacgcgtagcgttacggcgtttttgtgggcggtcagcagttcggctgcggccaggatctcgatagtcggggcgagggaggcgaagccttcacgcgtcagctcctgtacggtcatgcgcttttggaaatccgccagaccgaggctggaacaggtagcggtgtagccataggtcggcagcacgtggttggtgccggaggcgtaatcacctgccgattctggcgaccagtcgccgaggaataccgaaccagcgctggtaatgccgtcaaccagttcacgggcgttgcgggtctggataatcaggtgctccggtccgtactgatttgagatctctacacattgcgcgagatcgcgagcgacaataatacggctggcggaaagcgcttcacgtgcggtttcggcacgcggcagggcagccaactgacgttcaaccgctgcggcgacccgggagcccatgtcggcgtcgggggtcagcaggataacctgggaatccgggccatgttccgcctgggagagtaaatcggaggcgacgaaatccggcgttgcgccgccgtcggcaatcaccagaacctccgacgggccggcaggcatatcgatagccgcgccgtcgaggcgctggctgacctggcgcttggcctcggtgacgaaggcgttgccagggccaaagattttagcgactttcgctaccgattcggtgccgaaggccattgccgcgatagcctgcgcgccgccgacgttaaagatattacgcacgccgcacagctgcgccgcataaagaatttcatcggcaatcggcggcggcgaacacagcaccacttcctgacagccggcaatgcgcgccggcgttgccagcatcagcaccgttgaaaacagcggcgccgagccgcccggaatatataagccgacagaggcgatagggcgggtaagctgctggcagcgtacgccgggctgggtctcaacatcgacaacctgcaactgctgtgcgttgtgaaaggtctcgatattgttgaccgctaccgccatcgcttgtttgagttcgtcgctgagacgcgcgccggcagcggcaatttcttcgtcagatactttcagcgccgtgacggtggttttatcgaatttggcgctatattcgcgtaaagcggcatcgccattctctttaacgttagcgaggatcccggctaccgttttgctgatgctctcggaagctgaaatcgccgggcgcattaagagttgttgctgttgtgcggcgctacagctattccagtcgataatggtattgaagctcatggtcatttcccctgtttgtcccgtatgcggatagctggattactccatcatcttctcgatcggcagcaccaggatggagctggcgccaagcgctttcagtttttccatggtttcccagaacagagtttcgctgctgaccatgtgcatcgctacccgctgtttatcgcccgccagcggcagaatagttggtcgttcggcgcccggcagcagcgccaccacttcctccagccgttcggtcggcgcgtgcatcatgatgtatttcgattcgcgggcctggataaccccctgaatgcgggtcagcagacggtcgatcagctgctgtttcgcctcgtccatctcgccgtcacgctggatcaggcaggctttggaacgataaataacttcaacttcgcgcaggccgttagcttcaagggttgcgccggtagaaacgagatcgcagatggcgtcggcaaggccagcgcgcggggcgacttcgacagaaccgttcagcagacaggatttaaaggagatacctttctgatcgagatagcgttttaacaggtgcgggtaagaggtggcgatgcgtttgccgtccagcgccgccgggccattccagttttcatccaccggtgtcgccagcgacaggcggcatccgccaaagtccagacgacgcagggtaaagtagcgcgggtcttcgccctgcgcgcggcggctcagcagctcttcttccagcacgttctcgccgataatgccaaggtcgacaacgccgtccatcaccagccccggaatatcgtcatcgcgaacgcgcagaatatcgattggcatgttttccgcaagggcgatcagacgctgggtgtgcaggttgactttaatgccgcagcggccgagcagttcgcgtgaatcttcactcaaacggccggatttctgaatagctatgcgtaaacgggtgttgtctaacattgttgttttcctctgaatacctgtctgaatctgtccgaattcggtccaaaaaaaagcccccggaagtgaatcttccgggggctctctttgcgttcatgcaccactggaagatccaaacgtcttccagcacacatcgcctgaaagactagtcaggatgatggtgatgatggtggtttttaaattgaacgctgttcataaaattctctttgaatgactatgcatttgatgtcttttaacctaaaccagttccggcgcataaagcaagccttttttccatcattaattcatttcatattcgtcgaacaaattgtcaggtctcgcgggctagcgtagcctagtatcagcacagcgaataagtcaggagccagggtatgaaaaaggtcgcgattgtcgggttagggtggctgggcatgccgcttgcgttgtcattgcgcgcgcgcggttggcatgtcaccggcagtaaaacgacgcaggacggcgtggaggcggcgcggatgtgcggtattgaaggatatccgctgcgtcttgaaccccagctgatctgtgaggctgaggatctggacgcgatgatgaacgtcgatgcgctggttatcacgttacctgcgcggcgcacgggccccggggaagatttttatctacaggcggtgcaggagattgttgataccgcgctctcgcggcatattccacgcattatttttaccagttcgacctcggtttatggcaatactgaagggacgatgaaggaaaattcgccgcgcaatccacaaaccgccagcggcagggtactgaaagagttggaagactggctgcatgcgttgccgggcacctcggtggatattctgcgtctcgccgggttggttgggccatcgcgccatccgggccgtttctttgccggtaaatcggcaccggatggccagcacggggtcaacctggtgcatctgcaggacgttattgccgcgattgagctattgcttcaggccccgaaaggcggacacatctataatatatgtgcgccgcagcatccggcgcgcggcgtcttttatccgcagatggcccgtgaacttgggctgccgttaccggtatttaccgataacccggaggggggtaaaggcaaaatcattgatggcaaccggatatgctatgagcttggctttgaataccagtaccccgatccgctggtgatgccgatggagtaaccaccagcaggcattcgcgtaccataaggggggggcgatgaaaccactgctggatgttctcgttattcttgatgccttagaaaaagaggggagctttgccgcggcttcggcaaagctccataaaaccccctcggcgctgagctataccatccataaattagaaagcgatctgaatatccaactgctggatcgcagcggtcatcgggcgcgctttacttgcaccgggcagatgctgctggagaaaggacgtgagctactccataccgctcgcgaacttgagctgcaggccatcaggctacatcagggctgggaaaataccctgaccatcagtgtcgatatgacttttcctttctctcttttaacttcactgatggaacagttttatcaacaacgcaacgtgacccgtttgcagttcactagcgctggtggttgggatgctctggcggcaggcgaggtcgacatggtgctgggcgcgcttaacgagccgccaacgctggtgggttatggttttagtctgcttggcgatgtggatctgtgttttgtggtcgcgattaatcatccgctggcgcaggctaaggaaccgttgaatttgcgggtgttgcagcgatatcgggcgattatttgcaatgccgggttgctgcaaagcgaaaagcaggagagtgtgacggtttatgatatgaatagcctgctggagctggtatgcgccggcctgggctgggcttacctgccgcgctatctggcagaggcttggctggagaagggaaaagtggtcgagaaacgtattagcacacccgcgcggctgcatcgggcatggattggctggaatgaagacgtttttggccttgccgcgcaatggtggttacaagcgatattagcaaatagtgctattcgtcagatctacaatactaaaatagtatgaatattagtcggttagaattcttagcctattaataaacctttcaacatcttgtcattaagccagaagttgttgcaaaatacgcagcctgaaaaccagagactagccgacgctttttttaaagtgtcggttatttttttggtcgaaagacacatcattcaataccaagaggccgggcttcgtaccggatagatatttactaaaaaccgacagtcgttgtcgctgaggaatagaaagaaatggggcaattttttgcttacgcgctggccttcgccgtaaaaggggataactatgtcgcataacgctactccaaatacctctcgcgtggaattacgtaaaacccttacgttagttccggttgtaatgatgggcctggcctatatgcagccgatgacgctgttcgatacgtttggtatcgtctctggtatgaccgacggtcacgtgccgacggcctacgcctttgcgttaatcgctattctttttactgcgctgagctacgggaagctggtacgccgttatccttccgcgggttccgcgtatacctacgcccagaaatccattagcccgaccgttggcttcatggtgggttggtcctctctgctcgactacctgttcgcgccgatgatcaacatcctgttggcgaaaatctactttgaagcgctggtgccttcgattccatcgtgggtgtttgttatcgcgctggtcgcgttcatgaccgcctttaacctgcgcagcatcaagtccgtcgccaacttcaacaccgttatcgtggtgctgcaggtggtactgattgccgtgatcctcggcatggtggtatatggcgtatttgaaggcgagggcgccggtacgctggccagcagccgtccgttctggtccggcgatgcgcacgttatcccgatgattaccggggcgacgatactctgcttctcatttaccggctttgacggcatcagcaatctgtctgaagagaccaaagatgcagaacgcgttattccgcgcgctatcttcctgactgcgctgattggcggcctgatcttcatttttgccacctacttcctgcagctgtacttcccggatatctcgcgctttaaggatccggatgcctcacagcctgaaattatgctgtatgtggcgggtaaagccttccaggtgggcgcgctgatcttctccaccatcaccgtgctggcttccggtatggctgcgcatgcaggcgttgcgcgtctgatgtacgtgatgggccgtgatggcgtattcccgaaaagcttcttcggctacgtgcatccgacctggcgcaccccggcgatgaacatcatcctggttggcgcgatcgcgctgctggcgattaactttgacctggtgatggcgactgcgctgattaacttcggtgcgctggtggcgttcaccttcgttaacctgtcggttatctcgcagttctggatccgcgagaaacgcaacaagacgctgaaagaccacttccagtatctgttcctgccgatgtgcggcgctctgaccgtgggcgcgctgtgggttaacctggaagagagctcgatgatcctgggtctgatctgggccggtatcggtctgatttacctggcgtgcgtaaccaaaagcttccgcaacccggtaccgcagtacgaagacgttgcgtaattacgctttatgataagaaaagccggagggaaacctccggcttttttgtttctggcgtccgctgcttttccccgctggcggctgtcgctttgccgggggcactgggatggcttacttctcctgtcgcatcacattaagcagcgtatccaacagccctggaaaacgggcatccaaatcgtcgcggcgaagcgaaatgagattttcccgcccctgaggacgttgccagatcacgccgctgtcgcgcagcacccgccagtggtgagtcatggtggatttcgcgatatcttctttgcgcaatgcgttacaactctgctcgctgccgtcggagagcgtgcgaatgatttccagccgcaaggggttgcccagggcaaaaagaacattttcgaggcgaatttgttcacgttcggggtgattggcgatcataatattcctgtgtcggcggttgtgctgttcacgcgaacagcaacccgtatcggcggctggcggctactatacccaaactccttttcttgcgccacgcgcgccgtcgcaagctgaccgatagcagtgatagtaaaaatagttcgagtatactcgtacagttgtactattatagatgccgtaaacctaaccgcggcagatttagccgctcattgacagtcaaaatgactaaggacgcatcatgccccgacccatccccctcgaacgttatcgcaacatcggtatctccgcgcatatcgatgccggcaaaaccaccaccactgagcgcattctgttttacaccggaatgagccataagctgggtgaagtacacgatggcgcggcaactaccgactggatggcgcaggagcaggagcgtgggattaccattacttccgcagcggtaagctgcttctggcccgggatggaccgcagctttgagccccatcgtatcaatatcattgataccccggggcacgttgactttaccatcgaagtagaacgctcgatgcgcgtgctggacggcgcggtgatggtctatgactcggtcggcggcgtgcagccgcagtcggagaccgtctggcggcaggctaataagtatcacgtcccgcggttggctttcgtcaacaaaatggaccgcccgggcgccgatttcttccgcgtggtgcaaatgatgatcgatcgcctgaaggccaatccggtgccgattgttatccccattggcgccgaagagcattttaccggcgtagtcgacctgataaagatgcgggccattctgtgggatgatgcaacgcaggggatgacgttcagctatgcgcctgtgcctgatgacctgctgccgacggctcaggagtggcgggaaaaaatggtttcggctgcggcggaagccagtgatgagctgatgggtaaatatctcgaaagcggtgaattgagcgaagcggaaattgtggccgggctacgtaaacgcacggtcggcggcgaaatccagccggtgctctgcggcagcgcctttaaaaataaaggcgtgcagcggatgctcgatgcggtcgttgagttaatgccgtcgccgctggatattccggcgattcagggcattgatgacaaggggcaaccggcggagcgtcacccgagcgatgatgagccgctgtcggcgctggcgtttaaactcatgaccgatccctacgtcggccagttgacctttattcgcgtctattccgggacgttgaaaaaaggcgatgcggtctttaacccggtgaagggcaagaaagaacgtatcgggcgcatcgtgctgatgcatgccaacgatcgccacgaagtcgacgagctgcatgccggtgatattgccgcctgtgttggtctaaaagatgtcacgacgggcgatacgctgtgcgatccggatgcggtcatcactcttgagcgcatggagttcccggaaccggtcatttcgctggcgattgaaccgaagaccaaggccgaccaggagaaaatgggcattgcgctacagcggttggcttccgaggatccgtcgttccgcctgcataccgatgaagagtccgggcagacgattatctccgggatgggggagttgcatctggagattatcgtcgaccgtatgaaacgcgagttcggcgttgaggcgaatattggccgtccgcaggttacctatcgggaaaccatccgtaaaacggtgaaggatgtggaaggcaaatttgtgcgtcagtccggcggtaaggggcagtatgggcacgtcgtgctgaccctggagcccttagcggcggggagcggctttgtgtttgaagatgccaccaaaggcggggtcgtaccgcgtgaatacatcccttctgtggaaaaagggctgcgtgaagcgatgggcaccggcgtgctggcgggctatccggttgtcgacgttaaagcgaccctgacgtttggttcgtatcatgacgtcgactcctccgaaatggctttccgtatggcggcgattttcggctttaaggaaggggcgcgaaaagcggacccggtgatcctggagccggtgatgcacgtcgaggtggagacgccggaagagtacgctggcaatattatgggcgatctctcttcccgtcgcggaatggtgcaggggatggaggagcgtttcggtagccagattattcgtgccgatgtgccgctggccgaaatgttcggttattccaccacgctgcgctcgatgtcgcagggtcgcgcgacctatagcatggagttccatcattacgcagaagcgccgcgtaacgtggccgacgacatcatcgccagccgcgcgaaaagttaagtcagtactcccgggctagggtgacggcctggcccgggttaaacgatttcctgcgcatattgccacagcgctttcaacagggcttgtttttcactatcgtcagcatactgttgatacatcacctgcagttcatcggcataggcctgcaaaaactccggcgtaaagacgttacggcggtgctctaaccagcgctgctgttcgttttcatcaagcgtaccggggaagttacgcgcgcggtagttaaacagcaggcgttcaatgcgtttatccgcaaacgtaatatccagcgctggcaggttacgcggttcggtttccagcactatcttcatcgccgcgcgatcggcatcgctaaagaatccgttgtacagttgggcgtcaacattatccgatggcacgaacggttcggcttcggcatacagggctaccactttctcacgtacctgcggatttgcacgcagcagttgggcgttctccaggcagcgctgaatattgatacctaaacggtcggcatcctgcggacgcaacgtattggcctgcgccagcaccgggcatttatttaaatgcaccagcttaattggcgctgccggtaaatcgccgagttcgtctcgcggagtatacaggcgctcgcgcaatgtatcggcgtcgagctccaacaacggcgacatatcccccgccaggtcaaccataatcaccgcattgcggttatccggatgccaggccagcggcgcgaccaggctagtgttgccgcgggcggcgccgaacataccggaaacgtggaccagtggtttcaactgcggcacgtcgattaacgtcgccagcttgcgtttatttcgatgactgtacagatagtcaaacaggcgcggctgatgggtcttcaccagtttcgccatcgcaatagtggcgtacacatcggccatcgcatcgtgggcattgctatgctctatgccattcgcgacggtcagatgctcaaggcggaagcttggcagaccgtcttcattttcaggccagttgataccttccgggcgcagggcatagcaggcgcgcatcacatccagcaggtcccagcgcgaattatcatgctgccagctccaggcgtacggatcgtaaaagttgcggtaaaaaatattacggctgacttcatcatcaaagcggacattgttgtagccgacgatacaggttttcggcaccgtgaacagatcgttgatgcggcgggcgaaagcggcctcgttgtcgcctttggccagcgcttcctgtggcgtaattccggtaatcatcacggcctgtggttgcggcaggtagtcgtccgcaggcttgcagtagaagacttccggttcgccaatgacattcagatcgctatcggtacggatggcggcgaactgcgccggccggtcgagcgaagggctggtaccgaaggtttcgtagtcgtggaataaaaatccaggctgattggcgctgtcttgcataatcgattcgttatccatggtgtaaggcattccgtatggtaaacgatttgtagagtcatcagaagggtaacggtcagatgcatctactgtcatgtcatattttcttgcaatttagccctgatctctcaggcgaacttccgtaaaaaggacggcgaatctgtaaatcttgaggatatgccgttgaaaggccgttttttatttgctgtaactttgctcgcttcgagcgtttcctgcgcatttgctgccgctgatttgcccgtcaccgtgacgccgccatcgatccaggccggttcctgggtgctgatggactacaccaccggtcaaatcctgaccgccggtaatgaacaccaacagcgtaaccccgccagcctgaccaaactgatgaccggttacgttgtcgaccgcgccatcgacagccatcgcattacctttgatgatatggtcaccgtcggtaaggatgcctgggccaagggcaatccggtgtttaacggttcttcgctgatgttccttaaagcgggcgatcgggttagcgttcgcgatcttagccgcgggctgatcgtcgattccggtaatgacgcctgcgtcgcgctcgctgactatgtcgccggcggccaaccgcaatttgtcgcgttgatgaatagctacgttgaaaaattgcatttgaaagacacccattttgaaaccgtccacggactcgacgcgcctggccagcatagctccgcctatgatttagcggtgttgtcgcgggcgattattcacggcgagccggatgtctatcacatgtatagcgaaaaaagcctgacgtggaatggtatcacccagcagaaccgtaacggtttgctgtgggacaaaaccatgaatgtcgatggcctgaaaaccggccatacctcaggagcgggcttcaatcttattgcctcggcggtcgatggccagcgccgtttgattgccgtggtgatgggggccgatagtccaaaagggcgagaagagcaggcggctaagctgctgcactggggtcaacagaactttgacaccgttcaggtgctgcaaaaaggtaagcaggttggcgtcgaacatatctggtatggcgacaaagagcagattaagctcggcaccgatcaggacttctggctcgcgatcccgaaatcagaagttccacgtatcaaagcaaaatacgtgctggataccaaggatctggaagcgccgatcgccgctaaccaacgcgtgggcgaaatctcgctttacgatggcgacaaagtggtcgggcattggccgctggtgaccctggaaagcgtcggcaagggtgggatgttttcccgtctgagcgattatctgcatcacggcatttaatcttgttaccctctggcccgccgcactctgcggcgggctttattcatttcgcgcttgtggcgactctgtgaatccgcgcacatactgttgttcatccggctgctaaatttggtgtatatttatacagtattttgtcaacactggaggcgctatgaactacagcattcaatctctcgatgcccacaagattgccgggtttcatatggttggcccctgggagcagaccgtaaagcaggggtttgaacaactggcggcgtgggtcagtcaccaccaggtgcctgcgcaggagtgggtcgcggtttattatgataatccgcagcaggtacctgcggaaaaactgcgttgtgacaccgttgttaccgtggcggatgattacgtcatcccgccgaatagtgaaggggtcatcctcaccgcaattgccggtggcgattacgcctgcgccagcgcgcgggtcattaaccatgatttctccacgccgtggctgcagttctttgacagcctgctgcagagccgcgagttcgaaatcgcggataagccctgttttgaaatttatcttaacgatggcaaccaggatggtcactgggatattgagatgtatgtggcggtgaaccgtatcggctcgtaagtcgttatcccttatcttgacaaggttttttacattagcgcagtgcgctcgtgaaaaaagcggctacaattggccttttctgtttgccggagcaggccgtgcgcgctgataaatcacttaagccatttgagatccgtctgtatcgtcattaccgaattgtgcacggtatccgcatcgcgctggcttttgtcctgaccttcctgctggtgcgtctgctgaacgtgccggagggcacctggcctctgatcaccctggtggtggtgatggggcctatctctttctggggcaatgtggtgccgcgggccttcgaacgtattggcggcactatcctcggttcggtactggggctggtggcgctcaaactcgagcttatctcactgccaatcatggtgctgtggtgcgcggtggcgatgttcctttgcggctggttggcgctcggcaagcggccctatcaggcgctgctgattggcattacgctggcggtggtggtgggcgcgccgccgggcgatatgaacaccgcgctgtggcgaagcggcgatgttatcttcggttcactgttggcgatgctgtttaccggtatctggccgcagcgggcgtttttgcactggcgcatccagatggcgaattatgtcacaacgtttaatcggctgtatcaggccggtttttcgccaaatctggttgagcgcccgcggctggaaaaacatcttcagaaagcgctcaatgatgtggtgaaaatgcgtgggttgataaccccggccagcaaagaaacgcatattcagaaagcaatcttcgaagccattcagaccgtcagccgtaatctggtatgcatgctggaactgcagatcaacgcttattgggcctctcgtcagggccattttgtgatgcttaacgcccagactttgcgtgaaacccaacagatgactcagcaaacgttgctgacaatcgcccatgccctgtatgagggaaacccgcagccggtacgcgccaacaccgagaagctcaacgagatcgtggttgagttgcgacagcttatcaaagagcatcagggcgataatctgtcggaaacgccgattcacggctatgtttggctgaccattgagctggcgcgccagcttgagctgctgtcgcaccttatttgccgcgcgctgcgcaaataaaagacagatacgtgcgcgaagtgaacaggttgcttcgattcagcagcatttagggttatgataaatgcaaaggaaaaaacattgtcatcagcgactgctagcagttatgttagccctatagggcagtcgctttagcgaatccgaatctcaaatattaggggtgtaaaaatggaaacaactaagccttctttccaggacgttctggagtttgttcgtctgttccgtcgtaagaacaagctgcagcgtgaaattcaggacgttgagaaaaagatccgtgataaccagaagcgtgtcctgctgctggacaacctcagcgactacatcaagccgggtatgagcgttgaagccattcagggtatcatcgccagcatgaaaaccgattatgaagaccgcgttgacgattacatcatcaaaaacgccgagctgtcgaaagaacgccgcgacatctccaaaaaactcaaagtgatgggtgaagccaaagtcggcgaataaacctctcattagttccggcggcatagcaggccgccgggctccttcatctccctgccgttaaacctccgtataagcatcgacctttaagccgacagtttgttatactgctgccgtgaacttattgataccggaagggtttatcacatgctgtcccagctacaggtaccgccgcgatgatactgattaccggcggcgcgcgtagcggcaaaagccgtcacgccgaatctttactccaatccttcgcgtcggtgctctatatcgccacttcagccgctattgacgatgaaatggccgcacgcattcaacatcaccgcaatagccgcccgccgcactggcgtactgcagagcgcagccgtgacctgacgccactcattacccccgataatgcacccgatgaagccattttgcttgagtgcgtcactaccctggtcaccaatattctgttcgctgaaggtggggaaacggatcctgatgaatgggattacgctgtgttggaaaaggcagtcacgcaagaaatcactcagctgattgctgcctgccgcgcctgcccatcgccggtgctgttggtcaccaatgaggtggggttgggaatcgtgccggacaaccggctggcgcggcattttcgcgatattgccgggcgggtgaatcagatgctggccgcggccgccgatgaggtgtggctggttgtttcagggataggagtcaaaatcaaatgattaaatcgttcttcgccacgctttcttttatgagccgcttgccggttccggcccgctggtcgcaggggctggaaatcgatcaatatgagcgcgggatcgtaactttcccactggtggggttactacttggcgcgattgccggactggtgatgctggcgctacatgcctggtgcggcctgccgttggccgcgctgtttgccgtactggcgctggcgctgctgaccggcggttttcatcttgatggcctggcggatacctgcgatgggatcttttccgcccgccgccgcgagcggatgctggagatcatgcgcgatagccggctggggacgcacggcgggctggcgctgatctttgtgctggtggcgaaggtattcgtcattagcgagctggcgctgcgcggtacctcgatgctggcggcgttggctgccgcctgcgccgtggcgcgtgggatgtcggtgctgctaatgtatcgccagcgttatgcccgggagcaggggcttggtaacgtatttattggcaaggtgaccttccgccagaccgtcattaccctggcgctatccttggcgctggcaacgctgctgctgggcgtgcatggcctactggctgcggttataacgctgctggtggtatcggcgcttggccaggcgctgaagcgcacgctgggcgggcagaccggcgatacgcttggggcggccattgaactgggcgaagttatctttttactggcgttgctatagagcacacaccgcgctgacaggaagcatatgaatacaataactgaatggttagcggccatcccgcgaccggacgaaagcgcgatgtcgcgggctcgtaagcatattgacggcttgttaaaaccgcccggcagcctggggcgtctggaatcgctggcgattcagttagccggtatgccggggctacagggcgggctacgttttgcacgcaaaactatcgtggtcatgtgcgccgaccacggcgtctggcatgaaggtgttaccgtctcgccacaagcggtgaccgctatccaggcggccaatatgacccgtaagaataccggcgtttgcgtgctggctgcgcaggccggggctgatgttcaggtagttgacatcggtattgacgccgaaccgatccctgggctggtaaatatgaaagtggcgcgcggtagcggcaatattgcctgtaccgcggcgatgagccgggagcaggccgaagcgctgctgctggcgagcatgcgctacacccgtcagcttgcggagcagggcgtgcgtctgtttggcgtgggcgagttggggatggcgaacactactcctgctgcggccgtggtcagcgtgctgaccggccatgatgccggcgatgttgtgggcatcggcgcaaacctgccggtatcgcagctggcgcataaggcggaagtggtacgccgggcgatagcggtcaatcagccgtcagcgggcgatggcctcgacgtgctggcgaaagtgggcggttttgacttgctcgggatggctggggtcatgctgggcgcggcttcctgcggattgccggtgatactcgatggctttttatcgtacgcttcggcactggcggcctgccggatcgcgccacagttgcatccgtacctgattccgtcgcatctgtcggcggagaagggggcaagtattgcgctggagcacctgcagttgcaaccttatctggagatgggcatgcgcttaggcgagggcagcggcgcggcgttagccatgcatctggtcgaggcggcaggggcgatgttcaacaatatggggacgctggctgagagcaatatcgtgttgccggaaacccgttaagtggcttcggggcgccgaccggccccccgaaatagtgcttacagcgcctgctgccacacgctttgcggcagcagataaacatccgctttagcctgcatgccgtcggtaacaatatgacgaatgccgctggccatcaccgcaagggtgacatcaaacgcattcaggctatcgccaaaaccggcggtaaggttgagcattgagccatcggccattagatagattgttttccccggcatccgataagcgttgatatagggcataacctcttcatgcgggaactggcgcaggtgttcgcagtcaatctcttccgccacgtggccgacgttgagaataaatacgccatctttagcgctgtccagcgccaggctgttgaccacttttttgccgccggtggcggtagcgacgacgtcggctgatgcgatggcatcctgtaaatccacgacatgccagccgtcataagcggcctgtaaacggcgcgcgggatcgatttccgccaccataacctggccgccgaaggcttttgccgcggcggcgacgccttgcccgaccaggccgtagccgatcaccagcacttttttctcatgtagggtcaggtgagtagtctggaagaatgtgtgccaggccgtcaggccaaccatatggcggttatgtagcccttctttgaccggcagatcatcccagttaaagatagggtagccggggcgaatatcaccgaggcgattgacgccggagccggtggcttcaaggccggcgacgacattgccgaactcgccgcgctggtggagcagggtggtaatatccgcgcccatttcacaaaggtgagttggctcccaggcgatggctttttcccatgattgttgccagtcggcgtcactcatattgcgccaggcgcaggcttccgcgccacgttccaccagccaggagacaacctcatcctgcacggtggttggattacaggtggtcaaaaagactttcgcccctttctcaaggagtccctgcaccagcgggatcattttcatatccagatgcatacagcaggccaggcgcacttcgctgaggtcaggaagggccgccacctgacgcagggtacgcggcatattctggctggcccatgccacttctttcgttaaatttgtcttattattcaccgtattgtgacctttaatccgtagagtgggtttaaccccggtggggaagatgattctaacgcagggtgtaaaaatcacataacccacactgcccggtaaagttgcaaataataggcatcataaatacatggttgttaatgaatggttaaataaagacaatgaaacatcatttattcctatgatgtgagcgatttgttcgatgttacgcgttttacagcgcccgctattttctcgtgcgcgtatttttctcggccgtttaaaacctcatgccttacccgttgctaaaaagcatattgtactgggatcgatcggtgcgggaaccggactggcggtgaccagtatgttcagccactggctgttgggtgaggtgaatctgtggtttattgcgccgatgggggcctcagcggtattgctatttggcgtacccagcagcccgcttgctcagccctggtctatcgttggcggcaacgtgctttcggcgctgatcggcgtcaccgtcggactactggtgccggatacggcaatcgcctgcggcctggcggcggcgctggcgatcgctggaatgtactttttgcgttgtctgcatccgcctggcggcgcggtggcgctcacggccatccttggcggcgccggcgtacacagtgaaggctaccagtttgtgctgacgccggtattattgaactccatgatgctggcgctgctggcgatcgtcttcaacaatctggttggtcgccgctatccgcatccgctggcggcggaagaggtgaagccgaatgtagtgccgatggggattgcagtcactcgcgaggatattcacgccgcgctgatggaagggcagttccttgatatcggtgaggacgatgtgcaggaactactggagaatatcgaacagcaggcccgtctgcgtcttgccgccggtcaaaaagcgcgccagtgatgctattaagacacccgttgcaatgccttagctagcgccagcctgaatcgctcgatgaggtcgggttcaccgggcaataattcggcgagcgtaatcgttttgtccgcgcggtagaccttaccgctgccgagcagcgcctcgatatcattggccgcctgatgtgcggcctgcagatcggcatccagtaatatcacggcgtgcgccaggacaatgtgaccctggctttcggctatgggccgccagtattgagcggtaccggcaatcttgcgcgcgttttctccctcaccgcaggccagattatagcggccgtcgcaaaaagaaccgctgacggcttgaaaatggctttcgacgccaagagtcgaaagcgtgcgttgcaatattccacataacaacagatagatgggttcggcggcttcgcctaatggctggattaccggccaggcaagactcaggttgaggatcccgggcccctgcggcaccagcccgcctccggatcgacgcatccacaccggccagccaccggcggcaaaggattcactgacggtggccagattggcgaatttccggtaactgccaggaaccacgaacccttgcggcgcctgccagagttgagcgacggcttcgccgccgcgcgcgcgctcgaacagaggctgttcggcgagcgtgggatcatcgcattggacaatcggtaatccgccgatattgaagcggatgggcaaacagcctgcgttatgtggttcgcgcataaagcctccgtttttatgccggatggcgggttttcatcaacatcgccgtaacggcggagagcaggcagccgaccgtcagataaatcgccacgctatgccatgacccgccagagaaggtgaccagcgcggcggcgataaatggcgtaaaacctccgccgaccacgctggccacctggtagcctacgcctgcgccgctgtaacgatagctggcgccaaacatttcggtaaacatcggctgctgtacgcagaccaccatatcatgggcgatgttggccagcatcagggcaaaaaacaggatccagaacagcgagtgctgctccagcgccataaagaaggggaagccgcttaatgttccgatcagtgccccggtaatatagatacgacggcggccaaacctatccgccagccacgcaaagcagggaatggtaatacagctaataccgcccaccagcaacccaatattgaggaacagttcacgcggcaggccgaggttttgtgtcgagtagttgagggcgaaggcggtcacgatgtacatcgttaacagttcacacaggcgcagggcgatgatcaataagaaggcgccgggatggcgcgccaacgcttccagtaccggcaggcgttttttcttcgcggctggcgttttctgcagctgttgttcaaattctgccgactcgctcatgccgttgcggatccacaatgcccccagtaccagcactacgctaaacaggaatggcaggcgccagccccagctaaggaactgctcatcggtggtgaaactgctgataagcgataccagcccagtagagagtaacagaccgacgccataacccacctgcacgccgctgctatagaacgcctttttgttttttggcgcgctttcaaccgacagcagcgccgcgccgccccattcgccgccgacggcgaaaccctgcactgcgcgtaaaataaccaacaaaaccggcgcccaccagccaatctggttaaaggaaggcagtaggccgatgcaggcggtggcgattcccatcatccacacggtcatcatcagcatgcgcttacggcctaaacggtcgccgaaatggccgaagataatgccgccgagcgggcggaagaggaagccgacgccgaaggtcgcgaaggctgcgagcgtgcccatcgccgggccaatttgtgggaaaaattcgcggttgaacaccagtgcggcggtaatgccgtacaacagaaaatcgtaccagtcgacgacggcgccggcaaagcttccccatgccgcacgacgagcgcgatgaagagaagcaacccccttgccggagtcgggagaaataagcgttgagtccatgcctgtcctgtttgttgttaacttgttattatttgaatgagacgctttcttatcttcgcgccgttaacgagattaccgcgcataagcgcagctgaaaagttttttaccagcatgaaagacaataaagtaaaaaatgtctaaatcgaacatttaatttccaccactggtgtgggttaactgttgaccataactgctattttatttttgtggtcctactgggacagcttttaagaattcacgtaaatggtttacaattactatctccaacgctggatatggtgggtgatatgcgtctaatttttgcagttttattttatgttttggttttacccaatgctttcgcagaaaaactgcctgcgccaacaggcaaacccgttttaaccatttcaggaaagattaccaatacaaacgaaggtgataccgccgtatttgacattgccgcgctagaaaaattgggcaatgagacagtgatcaccaccactccgtggtattcagggaaagtgcgctttgatggtatttcacttagcaaacttatggacttagtgggcgcgcaaggtaagacggcgaaggtgatggcccttaacgattataccactgaggtaccagtggaggattttcataaattcccggtgatcctggcgctgaagatgaatggtgaatatatgcgcattcgtgataaagggcccctttttattgtttatccctacgatagtagcgcggagttacagaaccaaatctattattcccgctcggcatggcaggtttcaaagattataattgagtaaggctctgatcttgaatcgaatactcactgccattattttgtcgctttttatcgtcaccggatacattacctatctggtgcatgagcggcagagtgagctgcaaaaattaacccgttataccgactcgtggtctgtgtctcagatggtctccgaatacatgcgtctcgaggctcgtttaagcgccctggcgctgaacgtgaagggaaccgaccgcgatgaggtacgcctgcgcctggaaataatgatgagccagatcgagctgctgcaacagggcgatcttggtcagttcatcagaaaaagcgagcagcggcaggcaacggtgaccagtctgattcagatcctcgatcaactcgatcggcaactggacaccatgacgcctgagcagatggtgattctgctgcataccatgagtaagttagatggtccgatgacctcactggcctccatgaccctggcgcaggactttgatgtcgttaatcttacgcacgataagattcagcatctctattacatctattcggtgatttcaatcttgctgattacgatgtgtatcactcttgggctattgatgcttcggcaaaataacaacttgcgacgcgctcatgtgcgcatgaaattgctcgcgaatgacttgcagctgtcgaaagagaaattgcaggtacagaaccgccggttgcaatatgatgcttatcacgattcgttaacaggcatgcctaatcgcctctctttctggcagaggctacaggaagtggttaatcacgtgaaaccttatcatggttgcgctgtggttatgctgttcgacctggataattttaaagatgttaacgataccctggggcatgatgctggtgacaaactgctgcaggagctcgccagccgcctgtcgttcttccgtaaaacatcagagacgctgtacaggcttggaggcgacgaatttgccctggtatcgcaggatctgagcgaagaaatggcgctggagcgggcggatgtgatccgcgagaaaatcagccagccgtaccagatctacgattcattaattaacatcggggcttgcattggcatcgtaatctccgatgctgaaagtcgcactgattacttatacaaatgtgccgatctggcgttgtatgaagcgaaaaaatccggtgcgggacatgtggagattttccgtcccggcatgttgcaacgtttacaggacaacaaatcctttgaggacgatctgctgcatgcgctggaaaatgaccagttcaaggtttactaccagccgatcgccgacacggtgtcgcgtgaaatttatggttacgaagcgctggttcgctggtttcatccgctgcggggcatggtaccgcctacggaatttatcccggtggcggagaaaaccggcctgattaaccaacttggcgagtgggtgctgaagactgcctgtgaggaagcggcccgctgggagcaaccgctgaaggtttcggttaacgtctcaccgattcaacttatcaatacctcactcacagacacggtggttgcggtgctaaagaagacgggcctcgacccgcggcgccttgatcttgagattacggaatctgatgtatttaacgaaaatacgcgctcgctggagatcctcagccagttacgcgagcaggggattcagatttcgattgacgattttggcaccgggtattcgtcattgtcacggttgagttatttcccctttgataagatcaaaattgatcgctcgtttgtagtcaatatacctatgcaaaaagatgacctcgatattgtgcgcctgatcatcagtatggggaaaagcttacatatgcgcattgtcgccgaaggtgttgaaaccgaggaacaattaacctcgctgcaacaattgggttgcgatctcgttcagggctatttaattggcaagccggggcagttaaataacaactgaaacaagataatcctcagtctttaaactggcgccggtgaactatcactggcgcttttttatattttaaatagcgataatccgtaatgggtataaatagtggtaggtaaaatagattcgaaaaaacaatacccttagcaattgaaaggggtatatgatatgcaatatatcgttccattcgcggcgctatttcacggcgcggaaagagaggcaaatcatgcagcgaatcattataccgacccattatgttcagacccgttccacccccatgtggactaaagagactgcgcccgcgtccatctggaaacgccatcttgatgccggtacgcgacagggcgtctacccgcgtttatcggtgatgcagggcgcaatacgctattatggttatgccgatgaaacgagcccagaccctgttgaaacgatgactattgaagcggggcagtttggtgtctttcctccggaaaaatggcactgcattgaggcattaactgacaataccgtatttaatgtcgatttttacgtcgaccctaaaattctgattgagggataagttgagtctatgaacagtgaaaataaaggttactcattagcgatagtcaataacaacaataatgaaaaacgagagaaaatttatctcaagccgatggcgctttatgtccctgatatcgcggttcaggcagtagcggaattgcttcaggatctttcaaccgataacgcacagggcaaagggttcagtctgatggtgacgaacaataataacggtgtatcggtagataaagattttgctgcaatcgaggcgcttcaggatccactgcatgccgctgatgcggtgaaagagctcatcaatattgtgcgcggttatgagtctgacgaagagactaacgtctgcggttggtaaaaattcagtcaggcagatatcgtccgatatctgcctctttctctggtttcaactcatcgctatctgctgcagtagccagtcccgcaaggcgctgatatcggcgcgctgggctagctcttgtgtcgccaccagataatagtttgctcccggtaagaacatttcaaatggcgccgctaataccccgcgttgcaacagatcgcgcgccagcagttcgctggcaatcaccacgccttgtcccgccaccgccgcctgtagcgcatgcgtctcgtcgctgaaggttaaccctgcgtcgatattcagctgcgggggtccgtagcggcgttgccagttctcccagcccggcgaatctgccggaacgtgacgatgttcaatgtggaacagggtcgcgtgacgcaaatcctccagccgtgtaatacccagcgcggggctggcgacgacgataaatcggtcttcatgtagcaaggtacagtgcagttcgcgctccggcgtttcacgatagcgaatcgcgacatccacgctgcgctggttgagatccacccgttcgacgctggtatgtagccgcaggtcaatggcgggaaattccgctttaaatgctgccagtctcggtaccagccagtgagtcagaaagttggaagtcgtggtgacggtgagcgacggcggctggtgtgagcgaacaatttgcgcggtagcctcttccagcgcgctaaaggcgcgctgggtgccgacatagagaatttcgccgctttcggtaaggctgacgccaagggcattgcgttcacagacccgacactccagcacggattccagcagcttgatttgatgacttactgcggtagcgctcaccccgagcatatcggcggcgcgtttaaaactgcggcagtgggcaacggcatgaaaggcgcgcagcgcgcccagcggggggagacgtttttttctcatgactgagtttttctcatctatggctgaaatctatgcgtttgtgtgggtaattatacaggcgctagtctactgagatgtgaaaaaagcggtgaatttaattcaccatcgcttgagaatgtcaggagtgaaaaatgagtattttcccgcccccgcgtgctgtagtagcaacatcctgtgttgaaccgcgtgcgcaagctatcgcgctaagcagcctattcgcggcaggcgcgctgttattgagcgtttccgccattattggcgctatcgctagtttagcgttgctgctggcgctgacgggggcttttgctgttggctatgcaatcgcgcgttggcagccgtggccagcgcattattgcgtgacaatatcgtgttatgcctttgtgctgtccgctataggttggttactggttctggtgatatggaatagcgaacacggttggttggatctcattccgggaatcgtctttggtggattagggttgggcattgtctggcaaacccatgcggcagaaagaggtttgtcgaggatgatggcgaacatcccgacgatagcgagtatcgttattattaccctggctattctgctaaccagtcactatgccgattcaggaaagggaggctttgtctatgctctggcggtgctggtggatctggcgttgctgggtgcggtgctggtgaaaatcaggctacaggatgagcacagcatcaaatacgaatgatcgaacgcgtagataatttctgaatagagatagattgaaagtattgcgataagaaagcaaaaagcctgctcgtaagcaggcttttctgaatctggctcctctgactgggatcgcctttgccagtaagtggctaataagtaagctaaaccagagttatcttcctgtcaagaccaccagaatgaccaccaataggagctggctacataaatttggtttgagcttccctactgcatgtggtgatagttactatagtgtccctacgtgggaagcgctgatcctctcccctagtggaactgtgtctaaagagcgataacagtccgctcagggcgtgaagcggaagttgctaaatcagtctatgttaatcaacgaggagctggtagataagattgacactaaaaattatggtgatggttccaataacgtgtttgttatctggactttatcattaaaatcctctacaaaatccgagtgttttaaatttctaggcttcgtacatctacaatctgtactcgttgaaatttcttcatctccagagaagtactacaagttacgtatccatcaagaacgtgttatggaaggtatgatgcctgaagaaccaaaagccatagttatagaagatactgagtgggggtgtatccactcgcagtatcactaccaagataaagatcctgcgataataacatgtatcgtaaacgtaaataatactgacttaatagctacagagcttgtgaactcagtgttgaatacatcctgaatttcttctctcgatgctggtacacagcgatcatataaagttaccgcgaaagaaacgactgatcctaccctcgtaatatggacactgctctaagcgaggttctggttttcaaattgttccggagtgagaccgccacaccaactgtgccgtcgccagcgactgtaatcacattcgatataattaaacaccgttgcccgcattatttcccggctgataaagtgttctccatggagacattccactttcagtgaatgaaagaagctttccacgcaggcattatcgtagcagcagtgtaaatagacccattttagttccatacactttttgagatcccggccaaataatggcgctgtcggtattcctccggtgtcatattattcagcgattcatgcgggcgttcacagttatattttgataaccatttttcagtgatttcccgtacttcattcagcgttctgaacagataaaaatcgagtatttctgttcggtatgtccggttaaagcgctcaatgaaagcgttctgcgtcggcttacccggctggataaactccagttttattgcatgtttctctgcccattcagccagtgccagggagataaattccgggccgttatccagacgaagcatggccggatagccacggtttgccgcgatcctgtcgagtacacggaccactcgctgagctggcagattcagatcgatttcaatcgacaatgcctcacggttaaaatcatcaacgacattgaacatgcgaaaacgacggccacagaccagggcatcatgcataaaatcgacagaccagctcaggttcagactccggcaggcctgacggatactgagttcgaacgtcgttatcagatgagtaaccagctcacgcttaaaggctggttttaaagctttttttcgataacgtctttcagcgcccggttctccagactcaggtcggcaaacatttgttttagacggcggttctcgtcctcaagatccttgattttcttaatatcagaagcctccatgccgccgtatttggacttccagttgtaataggtggcttcagagattccggcctcgcgacagacatctttaacagttcgtccggcttcaaccgacttaatcacggcgatgatctgatgctcagtaaaacgggctttacgcatagcgctctccttcgttggcagattgattatgccggatgatctctaaatgtgaatggcacgattatgcgggatacttacaccaccgacggaatatgaaaatcaatattatcgacggctcagaagtgtctagattatccgtggcgattcaattctgcccatttgacgaatgaattagctgatagtcgtggtgataaagttgggactgcataggaaatagctcaatagttattttaggggtgatgagtggagaggctaatgcgagaaatgagttacatattttccattgagagaaataaacaggtgaacctctatattttgaagttagttttttatttgttaaatgaaattcaatacaatccagtcctaaagataggcctttacctcgatatttgatgtaagcttctttgagcgtccacattttccaaaaaagtaattgaccttcataacgaggaagtgaaactatgttagtagcttcctgtggagtaaaaaaatgctgactgatattcagataagagttgtctaaatctcttatttgttcaatatcgacaccaagctcgcagtgagaactaatagcaacggctactgtatctatagtatgggaaaggttaaaaaaaatcttttttgccaactgaggaaaaactataaatggtttgccatatttgcacgtactaaattgccatgattgtaatgagacatcaggttgatatctttttagtgctgttttgagcaggatacggcttaaaatatagagttctttattactcacaaaatgaaactgatcatagcgttttatttcttcctcattgagatagtgaaggaagttatctctactggtttgatgaaaaaaactagtatgtccaattaatatatcaatcctcatttagataatctcattcctgttagcaatgtgtatagcgtgattcgtattccgagcttgtattttatgtttgatgtttttcacatgaaactttactgtgtttattgatatgttaagattatgtgatatttgagagtactcatcaccttgtgccagcatgcgcaatacttgtctttcacgcagagataacgggtttttttctttgaacttatccatgtttccccccatcctgaatggtatctgtgtatctgtgtatctgtgtatctgtgtatctgtgtatctgtgtatctgtgtatctgtgtatctgttgttttggcagtatttaagaggaatttacgatacaacggtttttatgtaaatgggaattatgcattattttctatgtggtggctgtatcaattcatacccgctacatcatgtatgtactgcatgacttacatgtttttgcttacagacagaatctaattcattgaagaaaaacatgtaatcagaatataaggattttttgggggtattcctgtaagtgataaaatgcaatatgattatatgaatacgcaataaaaaactatacttgcggataggtgtgccatttagaataatcatgttaaataatctataaatccgataataaggtgatggttatggataatacctctggagattttccatgtaataagatggacacgcgtaagcagttaccgctaacaccaagtcaacaggggtttttattccattccttaaaggataagaaaaggagtaactaccatgagcattttacatgcattttttctcagcatgtagatagcgcccacttcaagtgggcgctggaaacgttatttcgaaagcatgagtgttttcgcactgattataactgggagattgatgagcgcccttgtcaggtggtgaagaccgatgtgttgccggatatatatgtgttagactgtgagcaagaggaaatacgttttctactagctaatgatgacattatcattcctgtcccgcaggatgacggtattgatgctataattcctcaactgctacaggctgatttaaaatacccattttccttgaaaacgatcccagtccgggcctaccttattcagtcaacgaaagaaagtgcttttatactatcataccatcatattgtgatggatggctggagcttatcccttttcattaaacagttgctccaactctatggagcggctgtggtcagtggtgtgagggatgatagcgccattatcccctcatctctgaaaccccttgtagacacactgtcggcccgacgtcacacctttcagcacgactattgggctgcatatcttcgggagggaacaccaacttgtatcgtgccgctgtcacaatatcacacagatactgaagccgagaacaattcttacgttaatcaaacaaatcatgtggagatcaatttgtctccggatgtgtgtcagaaaatacagacgctatgcagcgattatcgtatcacccccgcagtaatcttctatgtggcctggggcatcctgctacaacgttggtgctatgctgacgatgtgttattcggcgcgacaatatcagggcgaaatataccaattgatggtatagaagaaacactagggctatttattaacacgttgccgctgcgtctgcgtgatgatggggcgacactgttgcaacacttacaacgtatgcaccaaacactaatagctcactacagcaatgaacatgatgccttagccagcatacaacggttggtacataaagaaggtcatgctggggatctttttaataccttagtggtgttggagaattatcccgttgatatgacattattgtcatgcgcgtcgcccgtggcaattcgccatctcagtgtacatgaacaaacgcactatccgctgaccttgaccatcactcaacagaagggattccgtttcagtattgcatatgcccttaactacctgaccaacaacatggcgcaagcgttgctgatgcacctgagttatctgcttgaacaactggtggacaatccgcagcgccccattgctgcgttggtaaacttgtccccatgccagcaggcgcaggtacttcaaccctatctggaacgcatggcatgccgggattgggatagtcaatccaacgtcatcgaacaatttcatcaagttgctgcgacttcgccagcacaggtcgcagtggttgatgaattgtgcgcgttgacctattcggagttggcagcacaagctgagcagctcgcggcttatttggtacagcagggtgttatggttggcgatactgtaggcataattagcgaacgccgggtaaacaccgtggttgccatcatcgccatcatgttgatcggggctgcttatgtgcccatcagccccgactacccagtgggtaggatgcaggaaattattgatgacagcggcttggcgctgttgctggtacatggcaaaccgctagatgcattaaacgttgcgcagagtgacctctgtgcatttcccgtcgcgccctcggtggtatttccggttatcacaccagattctcgcgcttatgtgatttattcatcggggtcgacgggtaagccaaaaggtatcgcggtggcgcaccgcggtttattgcgcctgatacaaggcgacagcccgctgaaggtggagagcggtgagacaacgctgctgacctgcccatttgagtttgatgtttcggtgtttgagatgtggtctaccttgctcaaccacggcaaactagtattactcagcaaacaggcattacttgatatcaatcacattcgccgcacgatcgctgatgaacaggtggcgcgcgcctggtttacctcatccttgtttaactcctatgtggcagaaggtgccgatttcttcggtatgttacaacacattacggtgggcggcgaagcagtatctgcgtggcatgtcaacgacgtgatgcaaaaatacccgcatctggtggtgacaaacggttatgggccgacggaaaacactatttttaccaccgcatatcgtttcaacgggttgcaacccgcccgagtcccgataggatacgcggtaccgggcacctcgctctacattaccgatctccatgggcatttgttgcctatcggtgccaccggtgaactagtggcgggtggagtgggggtcgccatcggctatcagaacaacccggcgctaagtgcgacggtttttgtccctgatccttttattcccggcggtatgatgtacaaaactggcgattatgcccggttgctggatgatggctgtgttgactgttttgggcgtaaagacggtcaaattaagatcaatggacaacgaattgaaaccggagagatcgagcagcgcctgctggagtgctccggcattatcgaggcggtagtggttccttaccgcgtacgtgaaacgctgcatattgcggcagtggtctgcgtcaatgatagctatgatgaggtggaagttcgagggcaattggctgacagattgccgccattcgctattccggaatccttggtggtggtgacggagattgcaaaaagccatagtggcaaggccgacttggcgcagttgcggtatctcctgcccgcaactcagtgcaacgccgtgtccaccacgatatcagaggtgcatagtgacatggaacatgcgctgcatgctatctggcaacgcgtacttgatagacaagacattgatagcaatgcctcctttttcgccctcggtggcacctcattggataccatcagggttaaaggggatattaagcggcaacttggcttggagattgatattaccgatctctttaagtacccaacgctcacggcgttagcacattttctcgatactgccgtatcgccggaggatgcaattccaacgcgtgctgttgtctacagcgacatgccggtggcgattgtcggtatggcgggacgtttccccggtgcggcgaatattgcagcgttgtggacgctggttgtaggaggggaatcgggattaacactgttcagtgatgaagagttgcgcgcgcatggtgtgacacctgacacgcttaaacaagcgaattatataaaaaccaaagggattgttgatgatcacgaatggtttgatgcggatttctttggttatactcccaacgaggcggaatgtatggatccgcaaattcgcttattgcatcagtgctgctggcaaactctggaacacgctgggtgcgatcctgccacctttactggtgcgattggcatttatgccggactgctgacatccccccactggcttaatgcggtaatgcaagacactaccgactctaccgccctgtacaaggccagtatcctgaatatccattccgtcacagcattgattgcccatgcgcttaacctcaccggccctgccgtgacgcttgacaccgcctgctccacttcggcagtggctatccaccaggcctgcatcgcactacgtaaccgggattgcgatgcggcattggcgggcggcgtttctatcgagatgcctgcgtaccggggctatgaatatcatgaaggcatgatcaatgcgcgagatggtgtctgtcgtcctttcgatagccaagcctctggcacagtcaccggtgatggcttaggaatgctgctgctaaaacgtctggacgacgcgctggcggatcgggactgcatctatggtgtgatcaaaggttcggcggtcaataatgatggcaataacaaaatcggctataccgcgccgagtgtgatcgggcaatcaacggtaatccgcaccagtttgcgccgtgccggttttgatagcgacagtatcggattggtggaagcgcacggcaccggtacggtgctgggtgatcctattgagttacgtgcgcttaatgaggtgtttggcccaacacctgttccgttttgtgtggtttcagcgctgaaaagtaatattggccacctcaactccgctgcgggagtggcgggcgtcatcaaaacaacgctcgccctgcatcatcaagtgttgccaccaacagcgcactttcgccaactcaatcctgctatagatctatcgcgttctgcattgtacgttaaccagcaagtccaaccgtggccgtcgacgcgtcctcgtcgtgcactggtgagctccttcggcatcggcggcaccaatgccagcatcgcactagaagcacatcaacatgaggacgacccttcagcgacgggggtacgcgacagctatctgttgttgttctccgctaaaacacccgctgcgttagagttgcgcgtggcctccacactggaatatgtcaagcatggagtaggggtgcgcctgccggatgtggcttatacattgcaaactggacgcacagcctttgaccatcggcgggcttatttggtgagtcgtgggtcgaaaatcgatctctcctgtgccacgatattgcaagcggaaatcttcaatggtcagcgcacgacagcggagatctgcttcatgtttcctggtcaaggtagccaatatcacggcatggccagcgcgctctatgctcatcaacccatgtttcgccagcacatggatcgctgctttgctgcattccaacgctattcgacggtcgatctcaaggcgttgttgtttgacgatgaggatacgcgggatattgatcaaacgcagttcacacaaccggcgttgttctgtgtcgaatacagcctagcgcgcaccttgattgatctggggattacgccggacagtatgatcgggcacagtctgggcgagtatgttgcggcctgtattgctggcgtatttactcttgaggatgcgctgcacgtcattgaggcgcgcggacgtttgatgcagtccatgcgtcccggtagcatgatggcggtctaccttagtcgcgaacagttgaccccatggctagctgcagaacggggtattgaactggcagctaataatagcgcgcatttttgcgtagtcgcgggagagcaggcggccatttcccgtttgagcacacgcttagtcgagggcgggatacagcacaggcgcctgaaaacctctcacgcattccactcggccatgatgacgccgatgctgcacgattttgcacagttgctggggcaaatcccgatgcacgcgccgcacaagcgctttatatctaatgtaagcggtacatggattactgaggagcaagctacctcgccggattactgggtgcagcaagtgcgcaacgcggtgctgtttagcgaaggtgcggcgcaactgttggtacaacccacgctgtttatcgaatgtgggccgggtaatacgctctctacctttattcaaggacataaccaatacagcgatcagccgaccctgttgacgctacgcaaagccaacgcggcgatcgatgatgagcacatgttgcatcgtacgctggcggcgctgtgggtcaggggggagaatattgattggagacgctttaaccagacggcactcggcaagcacattccattgccggattaccccttcgaacagacttattactatcgctatggtgctgcactttccggttatcgccagtatccaaatcctctgcgccgtccgcaagatgagtggctccagcgtgtgctgtggcggatgcacgacacatccttgcgggaggcgttctatgcgccgggcgaattgatcatcattattagtgctgacggcgacaagttacagcagacgctgatgagtagtggtgtcgacagcatcacaatgccgctgccgatatcgtcagaggacgacgtgtgggataatgaccgtattctgacgcatttccacgacatctgcgcacttttagcacacaaaacctaccgacagttacattgcttgtatgctcccggtgcggaggcaggatcatcgttgacacagtcgctctcgggactttatcgtgttgctcgctggtgtatgcacagcaccacgccgctggcgtccttaacagtattgacccatggtgcgtttcgcgtacaggaagaggataatcccgaaccgacgctggcagcgttgtcgggcgcagtaaacgtgtttgcccaagagctgcacccgaccgaagtacgattgatcgatatcgatgcgcagagcagtgatgagaatctgaacttgctaacccagcgtctggccccgaaacaagaaacggtaatggcgctcaggcaggggatgctttacctgcgacgctttatcccgacacggctgttggcgcacttaccccctcaaacagggtgtataccgggcaacgtactgtggattatcggcggtgaaaaggggattggccgcatgatcggcgaagcgcttgctcagcgtgagggagtccgtgtggtactgagcagccgcacaggttatcaccatgaagcggtgcagcaggacgcattagacgttatccactgcgacgtgacgcaggcggaggcggttagagcttgtctggcaactctgctcgaacgctatggacggttggatggcgtgatttttgctgccgacgctaccaccacattgacactgcatcaattgagcgaatctgcgctacgcgacacgctaacggtgaaagaacggggtactgctaatgtgctgcatgcgttagcgcaacggaatctgctggatgagcgtctgctactgctgttctgtaactcgttggctgccgtgaatgcggagattggccagacaggctatgctaccgccagcgcctatttggatgcactggcacagcaactgcgtacccgctacaaggtgaatgcgctcagtatcgggttggatgcattgcgtgagcagggcatgttgttggatgctataaacggcagtgaatacgatgtcttgcgtggactgcgcccattgatgacgggaacgttgctacaggcttataaacaacaaggggctgacaccagctactacgcgcgattatcccccgagtccgattggctgctggatgagcaccggatatccggtatcgccacgctgccgggaaccggctatctggcgctggcgtatgaagctctgcgccattactttgtgcaagaccaaatctgcattgatgaattggtctttttggcaccgttgactgtgatggacaactgcagtgttgacgtttttgttgacatttcacctaacgggcaaggagttagtgtcgaggtgaaatcaatgacggagcgctttagtggcacgttaacaacccatgccagaggcagggcgacgcgtctgatggtagacgataatgttgtgtgcgatctcacggggctgatgcgcgagatgcacactatcactcctccaacaaaggaattatcgagcacgcacttccactatgggccgcgctggcacagcgtacaacaactgtatggcaataccgcccagactcaggttttcgcaacgctggccctgcccaccgttgccgctaatgatacgatcgcactgcaccctgcgctgttggacatcgccagcagtgttgtcgaacaactgcctggttttcatactgattcggtacctttcctttatcaggatttacgcctgtaccgcccgttgccgaacaccttacatgtggcgctgactgtcaatcggcacgatgaggagggtgacagctacgctttcacgctctacgacatggcaggcgagatggttgcccgctgtgcggcaatggtgaagcgcaaggtacagctccacatacaagatgtcgatgacgacacgcgactgcgcgtgcccagtgccgataactaccaactgcggctggccgctgagggggagggggcaggaaagctagcgttgtgccctacgccgcgcttagcgctgggggattcacaagtagagattgaggtactggccaccggactgaactttaaggatgtgctgttcaccacgggattgctccggcagcagccgggtgaggctccgctgcaattgggactggagtgcgccggacgcattactcgcgtgggtaaaaatgtcactgaatttgccccgggagaggatgttatggcggtgctaaacggtggttttgtccagtacgcacgggtagaaagcgattgcgtagtgagaaaaccagcccattgtcgcatcgaacaggcggctgcgctgcctatcgcatacctcaccgcctattacgcactggtggtgcgcgctaatttgcaacccggagaacgagtattgatccacagtgcggcggggggcgttggcttggctgcgctacatattgccaaacgctgcggagcacagattttcgccacagcaggtagcgagcagaaacgcgattacttgctttcgctaggcgtacatgccgtagctgattcacacgacgaacagttcgctgccactctgctgaccgcatcggacggacaggggatggatgtgatccttaactccctcacaggccgtctgcttgacgctagcctcgcgctgctggcaccgctgggccgttttcttgagctgggcagcaaggacattgtggaagacaaagcgctaccgatgcgtttcttcgcccaaggcggcacctttattccgattaattttcacgcggcgcatggtgcgtttagtcgctacctgcaacagattgtcgcttggatagatgataacacgctaccgctccttccatgcaaatccgtaccattgcccgaggttgcacgcgccttcgccaccctgaccacgccgcagcatattggcaaggtggtggtaacgcatcgcactgcggcaggcatggaccggctgaacgccatgatagcagaaaggcgcctcggcggctatgcgctcagcatgagcaatgccgaggtgatgcgccaattgtggccgatactgaacactcgcagtccgtgggcgcaactgctgctctcacctcgggcgatcgatagattagcgcggggcaaccgggtggatcgcggtgtaccgtctgccgctaacgatacgattactcagcagacagtgaaaaagcggccccgtccggaaattggcgtgccttacagccccgcgacacgtgaagtggaacgcgtgctctgccaaatcctggaagagtatctgggtctggatagagtaggcattgacgacaactatgccgaattaggggcaacctcactcgatatggtgcaactgagtgggcaaatggcgcgtcactatccgcaagtgagcgtggtgtcgctgtacaaccacgccaccgtgcgccagctggcgacgttttgccagcccccggagggcgagtcaaatgcgccatcaccacagcctgcagtacagacgaatacgcgcgcgaatcagatagcaaaacgtgctttgcaaattgcgaaaaatactgcgcgcagtcacacgtctttgcattaatccgggcgcctcctcgccctgaagaaaggtaatgaagtttatggaatacgcaagcgaaatgaacggcatggaaatcgccattattggtatggcggtccgtttcccgcagtcccggacgttacacgaattctggcataacatcgttcagggtaaagagtgcgtcaccttctttagcgaggaggagttgctggccgaaggcgtcgaacagagtactctggacaacccggcctatgtacgggccaagccctatatcgagggcatatgcgactttgatgctgcatttttcggttacagtcacaaagaggcgcagactctggatccgaaatcccgcgtattacatgaagttgcctaccatgcgctggaagatgcaggctatgcccaacgtaccagcgatctgatcaccggggtattcgtgggggcgtcagaagatgtggattggctacggcgttcgctgtcacagattggcggcgatgcgctgaatcgttttgagtctggcatctatggtcataaggatctgctcgcacatctcattgcctacagtctcaatctcaacggtccggtgtatagtctctacaccagttgttcgacttctctgagtgcaacgcatatcgcttgccgcagcttgttgtttggcgaatgtgatctggcgttggcgggtggaattactatcgatttaccgcagaagtcaggctacttctgtcaacagggcatgatccactccaccgatggccactgccgtccttttgacagtcaggcttctggcaccctgtttggcgatggcgcgggtgtggttgtgcttcggcgtttggaagatgctctggcagcgggcgatcgcatctatgcggtgatccggggtagcgcggtcaacaatgacggtaaacaaaaaatcggttttgtcgcgcctggtcatgagggacagaaggcggtcatttgtgcggcctgtcatctggcagaagtaagcccagaaagcatcggctacgttgaaacccacggtaccggcacccgtattggcgatcctatcgagttcgctgcgttgacggaggcgttcgatacttcacaccgccaatactgtgcactaggggctgtaaaggcgaatattggccacacccacgcggcggcgggcgtggctgggttaatcaagacggcgctggtacttcatcaccggaccattccgccgctcgccaactatcaaatgcctaactcgaagctggatctggcgcattcaccgttttatatcccgatacagccgcaggagtggcccgcatcgcggatgccgccccgcgctggcgtcagttcttttggcattggcggtactaatgtgcatatgattttggaagggctgaatcctgcggtgcgcgatgaccatgaccaagtgcgagcaccggtgtttatccctctctccgcgccgtctttcgagcagttggatgagctgacgcaacagcttaccccgttgctggctacccttgatgcgtcaacgctagcctacacacaacaagtggcgcgccccgtgtttgattgccgccgagtgatacaagtggaaaacgatggtacgcaagcgatgctggcatcgctggataacctaatgcccgacgctccttggggcctacactgtccagatctacgtactacgaacgattgtacttacgcacagtggctggcgcattcggcacattatcaacgcgaagcgactgctctgacggcattactcgacggcatgaatattccacccgcttattgccacgctgaaacgtgggcggcacaagcgaacagcagcctgctaatcagaggctgccagactatcgccgcgctaaaaacctggatgaacctgctaccgacattaacactgctgtcgggtgctggaacaggccttttgcctgccgctgcagccagtggcatgattgcgacgcaagacgtgttgcatttgctgtgggaaatggagcaaaaggcgcttcatctctggcttcctgagcgccatgaacctatccccggctacgtgctggcttggcaaggaaatcccatcaccgatgcacagcgtaacgacagagggttttggagtgaagcgctgttggcagatacccgagaactgggggagggcgttcacagtatcaactgggttaggctgccgccggaaataagagaagacgttgatgtattgcgctacgtggcgcaactgtggtgtgcaggtatcaatgtggattgggccgtgtggtacggcactccgctgccgcaacgcgggagcgcatcagcatatcccttcgcacacaaccactacccattgcctggacgggtaatgggtagtgtggagacccaacccgaagcaggacccgaaacgcaccacccttatcaggcacgtcccgtgttaagcgtacctttcgtagccgcacactcgcggggtatgcagtatatcacaggtctgatggaactgttgctggaaatatcgccggtcggggtggacgacgacttttttgaattaggcgggcattcgctgctggtgacgcaattgacctcccgtttagaacgcgatttcaacgtacatatcgatcttttgaccctgatggaaaaccccaatccgcgcaatatctacgcgcatatcgcggcgcaactggggggcgaagacaacctcgaaatagcctgtcagtaaaggagctcaatgatgaacgtggcggtaataggtgcaggagtaatgggaactggcgtcgctcataacatggcgcaatacggcatatcaactaacgttgtggatatttctcaatctcagttggataaatgccgacagatgatcgaagcgaacttacgcttatataattttcacccgcagcataaaaaaaagacgcatagcacagcggagataatggaaaatatccgtttcacaactgagttggacgacattgtagaatgtgatttggtgattgagaatattactgaggatatagagaaaaaaaatgcactatacacacggatgaatacgatctgcggcgcgtcgacagtgtttggtgttaatacgtccgccatatctatcactgcgttgtcaaaattaatgcgacatccggagaatgtagtcggcgtccattttatgaacccggtaccgctgatgcacaccgtcgaattaatccgtggtgtacatactgcagagcgtacactgaacatatttcaccacttatttgctcagttgaataaaaccggcatcgtggtcaatgattctccgggctttgtcactaatcgtgccatgatgatttttgttaacgaagccatatttatggtgcaggagcagatcgcccgtgctgaggatatcgatacgttgtttaaaacctgcttcgggcacaagatggggccactacaaactgccgatttgattggcttggatacgattttgcaatcgttgcaggtgctatatgaaagttttaatgatgataagtatcgccccagctttttattaaagaaaatggtcgatgcagggtatttgggcgtgaaatcagggcaggggttttatcgctatcaacagacgtacgccgagcagtgattctgggttaaccagatagggatatgaatatgaaaaagcaagatatgaaagccgccattcgggaatttctttcacgctcattacgtgggcatacgttgaacgatgatgacgatattttttctctcgggcttgtccattcgttatttactgtgcaaatcatactgtttatagaaaaaaattttcaggttgagctggaagtgagtgagttgaaaacagaacagattgctaccgtcaataaaatagtggagctcattcagcgacaaacaggcctggagtaaactatgtgcactgaaaattatgagctggctcagcaagaggcagtcctgtttgccaaacaacatctcgccctggctgcacagaatattgaacgtcagcagtttattgtgccagacattatttcttgcgtggcgcaggccgggtacttaggtgcgtcaatcccccaaaaatatggcggacgaggttacgattcttatcaactgtgcgctttgcatgaagtgatggctggggttcacggttcgttagaaaatctcataacagtgactggcatggtcagcacgctgctgcaacgcgtgggcagcgcagcgcaaaaagcccattatttgccaaagctggcaacgggggaattgatcggcgcgattgccctcacagagccgaatatcggcagtgacttagtgaacgtggaaacagaattacagcaggatggcgacggttggcggctgaacgggaaaaagaaatggatcacgctagggcagattgctgatttttttattgttttaatccactgtggtaatcaattagcgacagtgcttatcgatcgcaataccgacggctttactatcactccactcaacgacatgttggggttacgcggcaatatgttggcagagctgcattttaatgactgccgcctgaaggaggatgcattgctcggtccgctcacccctggggtaccgctggcggtgaattttgcgctcaatgaagggcggttcaccaccgcttgtggcagcctaggattatgtcgggccgctgtggatgtggcagcgcgctacatccgccagcgtaaacagttcaagcggcggttattttctcatggcattgttcagcacttgtttgccacaatgctgacccaaacgcgcagtgcgcaactaatgtgcttcagcgcggcggaataccgcgaaacgctgcacccggccatgataaaccaaatcctgatggcgaagtatgtcgcttccaaagctgcggtggacgtggccgggaaggcggtgcaactgctcggtgcgaatggttgccatgccgattatgccgtcgaacgttactaccgcgacgccaaaatcatggaaatcatcgaagggacatcgcaaattcatgaaatccaaattgcgatgaattacatgatggggagtgaagcatgacgaaggatgtcgcactgatgttccctggctccggttcgcaatatgtaggcatggcacggtggctgtatgagcgttatccgcaggtgcgtactctgtttgatgaagctagccagatcacggaacgggacatggcagcgctgtgcctgtcgggtactttggtacaacttgctgagccgacggcaatggcgctggctatctataccaccagcgtggcccactttgtcgcgtggcagcagtttttggcgcaaaccggtgtccatgtcaacctacgttatatgttgggtcatagtttgggcgaatatgctgcgctgacctgtagtggtgcgctgagcttttcccaagcactggcgctggtggcgatgcgtagccgtttagccagtgagatcgcccgcgaaatggacgcgagtaccactatcatcaagcaagggaatcaggcactggtggcagcggcgtgcgaggtggcggagcgtgaaacccgacagcaggtcggtattgcctgcttcaattcgccgcaacagtttatgttatccggacaaaactcggccattatcgccgccgagcaatacctgctggatcatgatcgccaagtcgaagtagtgccgctgattggtggtgttccttaccacagcccactattgaaaccttgcggacagcaattgcgcaaggcgctggatcgctgcgaatggcgacgtccgtgctgcccagtgatctccaatgtcaacgctcaaccctatcccgatacggtcacgccagtccagtggctagaacaacagctctctcagccagtgcagtggcagcgctctctcacctacctgacaggacacttgtcaccgatcgcgatagagatcggtccgcaaagtgtgctgaaaaacctgctgctggagaatcgctatccagcaccagtttacgcatttgacaatcgtcatgatcgtgcgcaactagcattggtgctgggggataacatggcggtgaagaccgatccggaagccgtgcgccgccaacgcatcacgctgctcactaacgccctgacagccacacgccatcaccgcgccgccgatgtggctgccagtgcgcaattgaaagaattgctcagtcgtttttttgagcgcatccagcagattgagcagcgcggcacatccagcgaagaggacattgcttttttgcatgagcttcttgaacagggatttcaactcaaaggcagtagtcaggcagaaatcgacgcctgccacgcgcggttggcttccgacaacggcggacaggcgtaacccgtcacgccattttacgtacttatctcgctttgaaggccagagttatggaacagcaagggattatgagacagttgcctaccgacgaccaaacgatagtcgactatttgtatcgtatcgccggagaatatggggaaaaagccgctgtattgatgggggacgcggcgctgagctatcacgatcttaatgcacgctctaaccaactggcgcattatctgcgtgggctggggatcggcgaggatcgtgtggtagctatccgcctgccgcgcggcatggcaatgctgattgccattttcgctattgtaaaagctggtggtgcctatttaccgctggcgtacaatgcaccgcgcagccgcattgaaaatatactgagcaacagcggcgctgtttgtctgatcggtactgacgatggtgatcgctggccgattcctcgcgtcgaaatcgacagcgcggcggtcagtgccatgccaacgacggatctgcgttaccgaccacatgcgcggcaactggcgtatattatttacacctccggttccaccggtgtccctaaaggggtggcgacggaacatgcagcgctgctaaaccgaattgtctggatgcagaacgcttatcctatcagttctcaggacgtgctgtttcagaagacggtgtacacctttgacgtctctgtctgggagatgttctggtgggcgatgtacggcgcatctgtagtgctgttaccgtccggactggagagcgatccgcgaaccttggctcgactgattcagcgtcaccgcgtgtcggttgtgcactttgtcccttcgatgctgaacctgtttgtcgagtatctggagatgaaacaggatcctcgtttgaccgcctcattgcgattagtgttttccagcggtgagaaactcacggtccacagtgtggctcgcttttatcaatcggtggcgcagggtgatcttataaatctctatggcccgaccgaagcagcaatcgatgtcagtcatcaccgctgcctgcgcgggtacgactacgacgatatccctatcggtcaagcgattgacggttgccgactctatgtgctggatgaccatggtaatccggtagcagacggcgaagagggcgaactgtatctcgctggtatcgggctggcacgtggctatctcaacaacgtggcgttaactgatcgctgttttactatacatccaactttgcgccatttagggaaaccggagcggctgtataaaactggagatctggtgtggcgcgacggggaaagccaacaaattcattacattggccgtaatgattttcagattaaaattagagggttgcgcgttgaattgggagaaatcgaagcccatgcgatgcgtttcccgggggtacagcaggcagtcgtggtggcggatcaggatgatcccgacaatcagttgatttacgcttttgtcgtcagtagcgtgccgctcaatttggcggccttaatggacgcactgtccaaaaacttgcctgcctacatgctgccgaaccgtttgttggcaatgtcagagttaccactctccgacaatggcaagtgctgtcgtaaaacgttgctcgacttggcgcgggcgtactcagccagtcgcgtcgatttacgtgaaactcccgccgtgcgctacctaccgttgtcatcggctcaatcgtcgatgtggtttatgcaacaattggcgccgcatactgcactatacaataaccccaccgccttgctgcttgaaggagaactggatcgcacgcggatggacggcgcgattcgtcaattgatgagtcggcatactctgttacgtgctatggcggaaacccacaatggacaaccagtattggcggtgcctcagtgcgtatcgtcgcaggcgttgctgaccatagtgccactcccctcggtgagtgatgataacgcgctacaggcgatgatcaaccagcgtgcggcacaccccatgcccttaacgtcaggcacaccgctgtgccggtttgaactgttgacgatcgatgacgatcgtagcgtattgttgattcatctgcaccacatcatcagtgatggctggtcgaaaggcgttttgttacgcgaattgcaggccgcatataacggtgaatcgctgacgccagaaccgttgttggagtatgccgactacatggagtaccaagaagagtggcgtcagagtgacgcctatcaggacgcgatgcgttactggcaaaataccctggcggggacgttgccgattcttgatatccccaccgatcaaccgcgtcagaaggtggcacgttaccagggcgcgtttgttgccttcgcattgtctgccaacacatgcgagcgagtgttggcggcggcgcgtgcgcagcgcgtgtcgttgtataactatctgctgaccgccttcgtcctcctgctgcatcgtaatgcgcgtcaacaggaatacatcgtcggtatgccgattgctgcgcggctgacgaaagaacaggagcatatgatcgcgccgctggtcaacgtactaccgctgcgcttacctcttgacgaagcggcatcgttttccgagttagtacagacgatcagaggtattctgtttgccgctttcaggcaccagcgtctcgaatttaccgacatagtgcgcgcagtgaatgtggatcgcagcgccggacatttcccaatatatcagtgcatgttccaactcgacaatatgcctctggcgagcccgacactaaacggtgtcaacgttacaccattattgttggataccagtgcatctcaggtggatatttcgctaagtatgcagcatatcgatgggcgcatcaccggcactttcgaatacgacgctgggttatacagtgcggatcgtattcagcacctggtggcgcagtggagagaactgctagatgaggccagcagccaacccacgcagttagtccgcgatttgattcgtttcacccctcgagagcacgcttggctggcgcggcacaacgccactgaagttgctctgccgcccgtagataacctgctggcgctagtgttaccgcactgccagcagcgccctacacaggtggctttgcgccacgctgacgacgccatgacctatggcgaattgcaacaggccacgatgcagatgtgtacttggctgcgtgcgcaaggcgtaaaacgcggagaatctgtcgcactgcaactgcctttttgtttcgaattgattatcgcacaattggcgatcctctctttgggggcgagctatgtgccgctggatggtaacgcgccagcggcccgcaatgccctgatcttggcgcaggcaacgccgtgcatgctgctggtggcgcaaccgctggaatcccctcatgggctgacgataccttgggtgctagtgcctgactggcgtagcctgctgacagaaataccgaacctgccagttagtgttgcgccagatgctttagattgcgatgcggtggtgatctttacctccggtactaccgggcagcccaaaggcgtccgactcagccaacgtaatctggtcaacttaaccgcatcctttatatccagctatcaagtgacgcatcaggatgttctgctacccattacctcagtcgcgtctgctagctttgtcggggaggtactgccgctgctcgccgctggcggtaccttagtattggcgcaaaaagcgcagagtttggatagtgatgcgctcattgcgctgctggcatctcagcgggtgactatcctgagcaccaccccatcgctttctgccagcctctctgtgctggctcagtcgatgggatcgctgcgcttgtttctgtgcggtggtgaagcgttagagtatgagcagatagcgccgcttctgccgcacatggcagtggttaacggttatggcctgaccgaaagcggtatctgctcgacctactttcctgtcgcaaagcgtagggagcaagaaacgggagcattgcccattggccgcccgattcagaacacccaagcttatgtggtggatgcatataatcgtttggtaccgccaggtgcctgtggagaactctgtttctctggtctgggcatttcgcccggctaccttgatgcacgacaggatcccgagcgctttgtcgagttgccggaataccctggcgttcgggtgctgaaaactggcgatcgtgctcgttgggcaaccgacgggatgttgttctatctcggcagacaagatcgccaagtgcagatccgtggataccgagttgaactgggcgacatcgaaagcctactgaaacagcatccggatattgctgatgcgtgggtcgatgtgcgacgcaatgcggcggcaacgccgctactagtggccttctattgcagcgtcaacggcgttgcgctggatgctcagcaattgcgcgtatggctcagcctgcggcttccgttgcatatgctgccgttgctctacgtgccgctgagcgccatgccgctaggtgtaaacggcaaaatcgatccccagtgcctgccgctggtcgatctgcggcagttggaagggccgggcgagtatgtccctccggcaaccgaactggaacagcgtctggcggagatctggcagcagttgcttggcctggagcgtgtcggcaccaccacaaatttcttcgatctcggtggacactcacttctgctagtacagatgcagcaatacatcgggcagcagtgcggtcagcacgtggcgttggttgacctgctgcgcttcactaccatcaaacgcttggcggaatttctgctggccccggacgcagcgcaagggaccacaggagatcagacacaactgcgtgcggcgaagcagcgtttggcctttggtcacacgcgctgggcagccacaaccgacagtcatcactgattccactgaatgaaacgcgtgataaacctgaatatagggggaaagcaacatggcagagaatgattttggtatagctatcattgggatggcggggcgtttccctcaagccgatacggtacaggcgttttgggaaaatcttctggcaagccgagagtgcatttccttttacagcgatgaggaactgctggcgatgggaatcagtcctgaatttgttcagcacccagattacgtcaaggccaaaggggaggtagctgacatcgataaatttgatgctgctttcttcggtatcgcaccccgagaggcggagctgatggatcctcagcaccgtgtcctgttggaaaccgcgtgggcagccttcgaagatgcgggctatgtggctgccgattatccgggggatgtgggtatttttgctggcaaaagcatggattcctatttgatgctgaacttgatgccgcactttaaacgcgttttctcttctggcagtttgcaggcggccattggtaacgacaaagacagtatcactactaccatcgcctatcacctcaacctgcgcggcccggcgatcacggtgcagacttcctcatcgacatccttggtggcggtgtgcgtggcatgccaaagtctgttgacttggcagtgtgacatggcgattgctggcggagtaacgctggggccaccagcaaaaaccggctacttgtcgcaggaaggtgggatcaccgccgccgatggccactgtcgggcgttttccgataacagcagcggatttgtgcccggcaccggcgcggggctggtggtgttaaagcgtgttgatgaagcgctgcgtgatggcgataacatctatgcggtcatcaaaggatttgccgtcaacaacgacggttcggagaagatcagttataccgcgccgagcgtggatgcccaagcgcgcgccattgctcaggcacagcggttggcaggtttgacaccgcaggatatcacttatgtggaagcccacggtaccggtacgcgtttgggcgatccggttgagttttctgcgctaagccaagcctttgcgggcgcgtcacaaaagcagtactgtgcgctggggtcggtaaaaaccaatatcggccatttggatacggcagcgggcgtcgcagggttgataaaaaccgcgctggcagtgcagcagggaataattcccgcaacattgcactttgaacggcccaatgcacagatcgatctgaccaatagtccgttttacatcaacactacctgtcaaccgtggcaaccggaaagcggcatccgtcgcgcgggcgtcacctcgcttggcatgggcggcaccaatgcccatgttgtgctggaacaagcgccagccgttgacttgcaagcgcgagcgcctgtacctgcctacagtattttgccgttttctgccaagaccgacagtgccttatcctcggggctggcgcgttttgccgattttctgcaacatgaatcgctgccggataggcgggatctggcgtggacactctcacagggacgtaaagccttcgcacatcgcgccgcgctcgtaaccagagatctacatgctgccgggacgctgttgcagcaggccgcgacagcgccgtttgctcgtggtgtagcgcagacacagctcgggctggggctgttgttttccgggcagggtagccaatatcagcgcatgggccatcagctctatcaggtttggccggcctacgccgatgccttcgaccgttgcgcgacgttactcgagcgtgaataccaactggatatccgccatgagttgttcagagcagaagtctcgttagcccaaggcgaacgccttgcgcaaacctgcctcacacaaccgctgctgttcagcgtcgagtatgccttagcccaattgtggctcagttggggaatcacgccaacggtaatgattggtcattcgctgggcgaatgggtggcagcgacgttggcaggcgtgttctctttagaggatgcgttgcgcttggtggcgcgtcgagcagagctgatgcatcaggcaccaagcggtgccatgttgatggtggcgctgcccgaagcacagattcgcgcactgattaccgccccgctggcgattgccgctgttaacgcccctgactattcggttatcgccgggcctacgtcggagatcctcgccgtcagccagcgtctgacggagcagaacatcatcaacaaacgattgcatacctctcatgccttccactctagcatgatgcaagatgcggcgcaggcgctacgtcaggcatttgagaatgtacgactgaacccgccgacgctcaccatcatctctaccgtaaccggcgcgcacgtcagtgccgacactctcaccacaccggactactggattgaacagatgctgatgcctgtgcagttctccgctgcactgcaagaggcgcaagctacatttgatgtcgattttctggaaatcgggccaggtgccaccctgacccaactgaccaacggtcatgcattaggtgatcgtctcgcgttcagctcgctgccagcaggtgcccgcagcagcgatgagcacaaacatatcttagataccgtggcagcgctttgggtgcgagggcataacatcgatttgtctgcgtttgcaggtgagcaaccgcgccgtgtctctctaccgacctacgcctttgacaaaatccgttactgggtcgacagtccagaagaacagaggagcgccgtaacgccggtggcggacgcgggaagtgtcatccctagcgaaccgtcggtgcgccgtcagccgcgtccggcgttttcggtgccttacgcggctccagagagcaaaacgcagcgcggcttagtggcgatttgtgaagcattgctgggaattgacggcttgggcattgacgacaacttcttcgaagctggcggacattcattgatgctgggcatgttgctggcgcaggtacaggaacggttcgccgtcactctttcctttttcgacgtgatggaggatgccagcgtgcgcgcgttagcgcagttggtcgagcaggagcagcaggatgatggagggtccgcacttgccgtgctagttaacgacatgattaatgagtgacgttggcaaaagtatttaacacagcgaaaaggaaaggacggtcatgacgatacatcatgccgcattggcgcgaatgttaccggcggaaaaaaaggaaaagctattacgacagttggcgcaatcaggcgtgtcgcccagccgcattcccatcatcaaagcggatccggcgcaggcaatcccgctgtcgtttaatcaggagcggttgtggtttttgcaaaaatacgacagtaccgccactaactacaacctttatgtggtgtatcgtttgcatggcgtggtggatatgccgatgctcacggaggcattgcgccatgtgcaagcacgccacgccatcttgcgtacccgtatcatagtacgtaacgatcggccttgccaggtgatagatgatgcgtcttcgttagttctcgatacggtcacgctggcagcgcaggccccaacttcagcgctagatgcggtaattcagcaggtgataaacacccggttcgatctggcacgcggtcctctgtggggggtaactcagattattcaacccgatcaaggttgtcatttggtgttttgcgcgcaccatatcatcatcgacggtatctcgttacggctattgttcgatgagttacagcagcagtatgctcgattgcatgctggtaatgaaacgtcgctgcctccgccgccgctgcaatatgccgattatgccttctggcagcgcgaatggttccaggataccttgctggcgaacgaacttgcctactggcgtgcgcgtttgcaagacgcgcctctgctgtcgacatttccatcgctgcacccgcgcccggcacaaccctctacacatggttcccggttcagcatcaccctggatgaaacattaagcctcgcgttgaaacacgtagcccgcacgcaggaaacaacgccgttcgtgctgatgctgactgccttccaactggtgctgatgcgttacgctcagcaacagcgattggtgataggcatgccagtatcggggcgcattcgcccggaattgcagagtagcattggttattatgccagcactgcggttatctacaccgattttaatggggttgaggtagggcgcgaggcgctccagcgtgtgaaggccagcgtgaaagagacgcaggggcgccagcaactgccgtttgaaaacttggtgaatatgctggatctccctcgcagcctttcccattcaccgttgttccagatcctctatatctaccataaccacgtgaccccacgcgcttttaccttggctggtgcgtattgggagcaggtgacgtatcacaatcagaccgtcaaatacgacatgacagtcgaggtgttccaaaacgacgccacgttcgacgtctcctttgagtacgatttggggttatacgatgctgatgtggtgaagcagattgccgaggcgctgcgtcagcactgcttatcgttgacatcatcactggagaccccgataggggcgatccctctgcatgcaccggagaccgcaacgccgcggcgtgatccgctcaacgccactaacgtcccgtggctcgggccgcaggatgtgctgcgtatcattgaacagcgctgtgtgcagcacccaaagcaactggcaatacagcagcatgacggcacactgacctacgctgagctctgggcgcgtgtgcagttcatcgcgatgcgttttcgagcgcatggcatacaaccgggcgatcgtattggcgtgctgttgccacgtcacagggatgtgattgcaaccatgttggcgacgtggtttgtgggggcgtgctacgtgccgttcgatattcatcagcctgccgcgcgtttgcaacgccttatgcaacgcgcgcgtttggtctgtctggtggtccgtcagccgggagagtggggtgaaattgtacaactgtcgttgccggaattgatgcaggacatgtcgaatgcgatccggtattctacaccttgcgcgctgttgccggatatgcaggcctacctgttgtttacctccggcagtaccggtgaacctaaaggcgtgtgcgttgttcaccgcgggttgctgaacttgttgttggatatgcagcgtacctttgcggttggctcgcaagaccggctgctctcggtgacgacgccaacatttgatatctcattcttggagtatctgttgccgctgatctccggtgcgagtctctatctgacagaggcggaacgcgccgcagacagcttccgtatgattccgctgattgccgactatcgaccaacgctgatgcaggcgacgccctcgttctggcacgggctgttgatggcgggttggcgtggcgacccggaactatgtgtgctggcaggcggtgaagcgctgccaacgaaagtggcggaagaactgttgcgctgttgtggttcattgtggaacctctacggtcccaccgaaacaaccatttggtcgctgaaatcgcagataacccaagcggaaaacatcaccctcggcgctcccattgccaatacccgtatatacattctggacaatgagggccatccagtgccgcaaggcgttgacggcgagctttacatcgccggggatggtgtggcgcaagggtatgatgggcagcctgagttgaacgcacagttcttcttgtcagaaccaggggtccccggtggcaggatgttccgcactggcgatctggtcaggagtgatgcgcaggggcagttgttttttgttgggcgcaaagatagccagatcaaactgcgcggttatcgtattgagttaggcgaaattgaacggacgttggcacggcatccgcatgtggacgccgcggtggtggcctgtattgaaagagcaccgttacacaaagcactggcagcattcatcatcaccagtgagcctccctcgctattcgagcaactgaaaaacgagcttcggcagcaactgccagactatatggtgccaacgctgtggcagagggtggccgacttcccgaacactgacaacggtaaaatcgatcgtaagcggttagcggaaaatttcgttgccgatagctcccttgtgtcgccgcagacgcaagcgctgagcgacacggaacagatgttgctggcgctgtggatgcgctatttgccgataaaaaacgtcgatcctgagtgcgatttctttcgcttggggggacattcgctgttggcggtaacgttggtagcagagatcaaccgcacttttcactgcgccttgaccctgaaggacattttccactactccacactacgggcactgagtgcgcgtattgcacagcaatctatcacggacgctgccgcgtctcaggatgactgggtgatagtgcacgaccctgagcatcgtcatcaaccgttcccattgacggatgttcagcgcgcctactggcttggacgacagacgggtgctacctcgatcgcgacccacatctaccatgaatttgacgtagaacactttaatgttacgcattttacccatgcggtgaatgcgctgatcgctcgccatgaaatgctacgtgcgcgggtactccccgacggtactcagcagattctggcgcaagtgccggcgtatcagttagagcagcgcgatctgagtgctttgtcccctaacgcacgaaacgatgccttgatggcgatccgcgatcggctgtcgcatcatgtgcatcccgcagatcgttggccgctgtttgatttcagttattcggcttgcacggcgcaacatggccgcttgcatttcagtctcgatctgctgattgccgatgctctgagtatgcgcacgctacagcaggagttgatgatgctgtaccgtgagccccatgtgtcactgccgttgctaccgttctcttttcgtgactacgtgcaggcgctgttggtagagcaggcgagtgaagcctatgcacgcgatcaggcctattggcaacgggcgctgccgcagctgtatggcccaccaacgctgcccgtacagggcgatttggcgcaactgtctgcgatcaggttcgtacgtcgccgtcatcggctgtcagcccacaactggggagtgctgagcgcgctggcccaacgcacacgtatcaccaagacggcattgttgttgacagtctttagccaagtgctggcacgttggagccttagcccgacgtttacgctcaatctgacgttgttcaaccgcccgcagggttaccccaacgcagaggcagttattggtgattttaccgctgtcagcttgctgaatgtttgttacgacagccagcactcttatgcccacaacgctcagcgtattcaggtgcaactgtgggaagatctcgaacatcgtcgtttcagtgggatccgcgccagcgaggcgctgatccatagcggtcgtttccatgcgccgatgccggtggtattcactagtatgttggatatcgacggggagacgactgcgcaagaccctcgggacacaacccgttttactctgtgtccggacgccaatattacccaaacaccgcaggtgtggctcgatcaccaggtgatcgagttggctggggagttgcatttcaactgggacgcggtcgagcaactgtttgataccacgctgctggatcagatgtttggtgcttattgtcatgcgctgcaggcgctggttgccatgccgcaaagttggtggggggtaaatagttctctggcgctgcccaccgttagtgcaccggtcacgcaggcccctgcacctacggccttgttgcaccatgggttactgcgtcaggcagcactgacgccacaggaaactgcgctgatcagtcctatccgtgaattgacctatcgccaactgtcgacggcggcggatcatgtggcccgcgccctgttagcgctgggcgtgcagcatggcgaccgcgtggcggtggtgatggaaaaaggctggcagcagattgccgccgtacacggcattttacgactgggtgcggtctatctgccagtggatccggtgctaccgccacagcgtcgccagcttttgctgacggtgggcgaggtgcgggtacaagtaacgcagccgggtctcacgcaattggagccgtcgctgccccgtgctgatcatcgacgacggaatgctggacacgcctgctgcgccgttgcctgaagtggctggggatgtcacggatctggcctatatcattttcacttccggctccaccggtaccccgaaaggagtgatgatcgaccaccgtgcggccatgaacacgctggaagacatcaacgaacgctttggcctcaatgcgcaggatagggtgttcgggctgtcatcattgagctttgacctgtcggtttacgatgcctttgcgccttttatggtgggtgcagcgctggtactgccggaagcaggacgggaaaaagatccgcgtcattggcagacagttatggtacacggtcatgtaagcgtctggaatgcagtgcccgcactgatgcagatgctgtgcgaataccacagcggcgatcggatgagttatccgacgttgcgtctggcactgttgagcggcgactggatcccgctaacgttaccggagcagatgcgcgagcggctcaatgaaacgatggacatcatcagtctgggtggagcgaccgagtgcgccatctggtcggtctactacccgataggtgaggtggaatcgacgtggaccagtattccctacggtcggggtctgcgcaaccagccagtatacgtgctaaatgcgcaactggaggaatgtccggtcggggtggaaggagagatttgcattggcgggatggggctggcacaaggctacctgaacgatgcagagaaaacggcggcgagctttgtctggcgcgaagcgagtggtgagcgaatttaccgcactggggatcgcgggcgctactttgctgacgggcaagtcgcctttttggggcgcaacgatacccaagtgaaggtgaatggttaccgtatcgaactgggggaagtcaaaagccaccttgaacagctcgacagcgtagggagtgccgccgtggtgtgccaccagggacagctgtatgcctttatcactgccgcagaaaacctgcatcctgacgatactgacgccctgttagcgcgtgttcgtgctcagttagccgtgcagttgccgtattacctgctgccccaacatttctttcttctcaaggtgctgccgatgacaggcaacggcaaaattgatcaggcggcaatggttcaagaggttatccaacgtatgtcgcaatctacatcacagaagtcgagggccctcgcgcacgcctcgccctatgaacagcaggtggccgctctctggtgcgaggtactacaacgagaacagatcggactgaatgacaacttttttgaagcggggggcgactcaatccagatcgtgctgttgcatcgccgtattgaggagatttttaaggttacggtacctattgctgagctatttcgcttaaccaccgtgaaaagaattgccggttatttgcaggctatgcaggacaatgcacgggcggtgaatcaaacacagcagcgtgatgcttcccgatcccgcgcccagcaacgacttgtacgtcgtcaccagcgtcagcgttaaggaaaaactaatgacttacagtgaaagcgatattgccattgttggcatgaactgccggtaccccggcgtgcacagcgttgcggcattcgaaacggtgcttcgcaccggatgcaacattttggaccccaaagtgaccccgagcaacggccacaatcacattacgctgaacaacgtctatgagcacatggcggagttcgatgccaacttttttggctacagccgtgcagaagcagaaatcatggatccacagcagcgcgtatttctgacctgtgcttgggagatgtttgaacaaagcggttacaacccgaagcagcacgatgcgcgcgtcggcctatatgcgggcgtgagtaccagcttctatttgcttactcacctgatgaacaacccagacaagcttgcacaactcggtggtctccaaatcatggtcggcaatgacaaagatcatttgacgtcccaactggcttaccgcctgaatattaccggcccttgcgtgacggttcaggccagttgtgccacctcgctggtggcagtgcatctggcctgcgaagggctgctgagcggtcagtgcgatatggcgctagcgggtggcgtcacgtttcgcatggaggagcagcgcagctatgaatcgcacggtgatgggctgcaagcagaggatggcctgattcatacttttgatgcgcaggcgagcggtacggtctacagcagtggtttgggcatggtgctgctcaaacgggctacagacgcgcaggtgcaaggggataacatccttgccgtcatcaagggaagcgccatcaacaatgatggcggtgcgcgcagtggttataccgtgccgggtgttgatggtcaggaagctgtgatgattgaggcgcatagcttggcggaggtgacgccgcagcaaattcagtatctagaactgcatggcagcggcacgccgttgggtgacgctatcgaattcgcggccatcaaacgtgtgtttgggacgccagcgccgaatgcgacaccgtggcgtctgggggctgtgaaacctaacgtgggtcacgtagaaatggcatctggcatcaccagtctcataaaaacggtgctgagtcttactaaccgggtgttttaccctacgctgaattttcaacgggctaatccgcaactggggttggaggacagcccgtttgaagtggtgtcccgtttaacgccttggccggagggcaccacgccacgcaccgctggtgtgagtgcgttcggattgggcggcaccaacgcacatctggtggtacaagcgccgttatcgacgccgcaggcgagggcgcagcagatggggccttgtgtcgttgtactctcggcaaaaaaccacaatgccctggaacagatgcaaaacgccctgctggcgaaactggccgcacatccagagatacgcttacaggacgtggcttacaccctgcgtcacgggcgtttctccgccccggtacgtaagtgtgtcatcgcagagaattgcacccagctagcccgacaactccgcgacgcaccgatggtggaggcaaccacgggttgcacgatctactggagattggggcaccgtttcgttgttgcactcgagacgcttagtgactggctggcgtgctctgaggtgttgtcacaggcggtgggacaactgctcgagcattttccgctcgaaccagcctgtctgcaagatctctcccctgcgcaacggacgtttatcagccagtatgcgctgatcgcgttgattgacgaacgggaaacgttgaatgtggtgctatgcggcgacggtgatggtggctatgctgccgccgtactacgaggagactgcacactagagcaagcatggcacaggttgaatgcgggccaaccgtttgatgatgtgccgacgaatcccctcttgcagcccgatgtctgctctttgatgctggacgacgcggcgagtgatgccaatcgcaccgcgctagaggcgttagggcagttatggttggctggcgtcagcctagattggcgctgggtggatgcggcggagcgtatgttgggcagtcaacgcatcgccctgccggggaccgtttttacaccgcagcgctattgggtcgaggccgtacggcctgccacgttctcccacgaatcgtcgaataatctcttatcccgcgcaacaaaatccgatattattgcagtggtgacggagatatgggaacgcacgcttggtgtcagcattgatgatcaccacgccagcttcttcgaactgggtgggcattcgctgttagcgtcaaccattttatatgatattcagcaacgttacggcatcacctgtacgctaagcgcattctttgccgatcccaccatcgagggattaagttgctatctgctcgaacaagccggcagtgagacagcggtttcagcattgcctgatacggtctttgcccctgaccagcagcacctaccttttccgctgactgacgtgcaacaggcctattgggttgggcggcgaaaatccttgggattgggcaatatttccacccatatctatgtggaatatgaactacaggggctagatgaaacagcgttcaaccgcgcgctcaatgcggtgattgcgcggcacagcatgttgcgtgcaattgtcaacgatgacggtatgcagcagatattgccaaacgtgccggaataccacgttgccttctataccacccagtgcgaggatgcgtttcaacagcgttgccgtgagctgcgtgacaccctctcacatcagatgattgattgtagtcgctggcctctgtttcagatggaggtcgtggttgatccgcagcaaaaagcccggctacatgtatctatcgacctgctgatagccgatgcatggagtctggagttgttcattcgggaactagcttatcactaccgccatccgcaggcggcattgcctacattgacgtacagtttccgcgactatgtgctgaccttaaaatcctacgagaaaacgccgcagtttgaacgggcacgtgactactggcgcgcccgcatcgaaactctgccgccggggccacgattgccgctgcgtaccgaccccacgaagctggaaaaccccacattcgtgcgccgtagctattgtctatctcgtgctatctggcagcgcttgaaaacgcaggcgggtcagatgagtatcacgcctactacactgctgctcacggggtttgctcaggtgttggcgcgctttagttcctcgccgcactttagccttaacctgacgctgtttaatcgtctgccgttgcacgcagatatcaatcacttaattggcgattttactgcactgacgttgctggagattgatatgtcgcagggagaaaccttgcaggcgcgggcaaacgtgatccactctcaactgtggcgcgatttggataaccgcttgtttggcggtatccaggtctctcgactgctggtacaaactcaccgcgatccggcgaaatcggtgattcctatcgtgttcaccagcttgctcaatcaatatgaggcgagctgggaaacggatgatacgctgttcaaccaaccgcaggatgatctgtacagtatttcacagacaccgcaggtgtggctcgatcatcaggtaatggagcgtaacggggaattgcactttaattgggacgtggtggaacaattgtttgaaccggcgctaatggatcagatgttccagtgttattgccaactcctgcacgccctagcccagcgaccacagctctggcatgagactcaagatgtgctggcgctgcccaccgttagtgcaccggtcacgcaggctcctgcacctacggccttgttgcaccatgggttactgcgtcaggcagcactgacgccacaggaaactgcgctgatcagtcctatccgtgaattgacctatcgccaactgtcgacggcggcggatcatgtggcccgcgccctgttagcgctgggcgtgcagcatggcgaccgcgtggcggtggtgatggaaaaaggctggcagcagattgccgccgtacacggcattttacgactgggtgcggtctatctgccagtggatccggtgctaccgccacagcgtcgccagcttttgctgacggtgggcgaggtgcgggtacaagtaacgcagccgggtctcacgcaattggagccgtcgctgcccgtgctgatcatcgacgacggaatgctggacacgcctgctgcgccgttgcctgaagtggctggggatgtcacggatctggcctatatcattttcacttccggctccaccggtaccccgaaaggagtgatgatcgaccaccgtgcggccatgaacacgctggaagacatcaacgaacgctttggcctcaatgcgcaggatagggtgttcgggctgtcatcattgagctttgacctgtcggtttacgatgcctttgcgccttttatggtgggtgcagcgctggtactgccggaagcaggacgggaaaaagatccgcgtcattggcagacagttatggtacacggtcatgtaagcgtctggaatgcagtgcccgcactgatgcagatgctgtgcgaataccacagcggcgatcggatgagttatccgacgttgcgtctggcactgttgagcggcgactggatcccgctaacgttaccggagcagatgcgcgagcggctcaatgaaacgatggacatcatcagtctgggtggagcgaccgagtgcgccatctggtcggtctactacccgataggtgaggtggaatcgacgtggaccagtattccctacggtcggggcctgcgcaaccagccagtatacgtgctaaatgcgcaactggaggaatgtccggtcggggtggaaggagagatttgcattggcgggatggggctggcacaaggctacctgaacgacgcagagaaaacggcggcgagctttgtctggcgcgaagcgagtggtgagcgaatttaccgcactggggatcgcgggcgctactttgctgacgggcaagtcgcctttttggggcgcaacgatacccaagtgaaggtgaatggttaccgtatcgaactgggggaaatcgagcgctgcattgcgcgacatcccgatgtggagcagtcagtggtggtggcagtgggtaattctcaacatcgtcggctggtcgcttttgccaaactgcacgatcgccaccaggcgcaggcattgcaagctaaggaagcggaggcggcggcactggcgcagggtattattgtgaatccggcacagcgtctagcgttcaaactcaaggagccacatattcgcgcgctggatggtctgggcattgcactgacggcaccggcggatagcacacgttacatcaaacgccgcagctatcgtcatttcagcgcgcaaaaaaccacgctggcacagttggggcaattgctgtcgggcttggggcagatgcgtctacccggtctaccttttgccaagtatgcctatgcgtccgccggggggctatacccggtgcaaacctacgtgtacctgcatccagacaagatcgaagagggagtatccggtatttactacttcgacccgcgacagagctgtcttatgccggtagcaccagaagtcgagctgaacagtggttttcatgccggacctaatcagtctattgccgatcgggcggcattcacgctgtttatggtggctgatatggcggtgatctcgccattctatgggcaagaggcagcttggcacttctcggtgatggaagcaggtactctctgccatttactggaagaagatgcgccgcgctacggattggggctgtgccaacttgggatggcagacttttccgctgtggcatcgcattttcaattgtcgccacatcatcgctatgtccattgcaccgtggggggcgtgatagggcaagaggcggcaagtgctgcagcattgctgcgcgatttctccacctatgagaaaccgaaggaaaccgctgcgccgctggacatgcagagctacaaagatgccatgctgcgcggcctgcgtcagcaactgcctgactatatggtgccgagtgatctgatgttagcgaccgattttccgttaaccgctaacggcaagctagatcggcaaaaattacagctgcagggcgaacaaattgcccaccagcgtgacggcgtgggtccaatccaggtggacagtgcgttacaacagcggctggtggcgctctggcaggaggtactcggcgtgagccacgtgtcggccgaagacgatttcttctcgctggggggcagttctatagaattggtgcgtattcagcaggcacttgaggcgattatcgggcaggagattcccattgtcgatctgttccgtctgccaaccatcgcggatgtggcgcgttaccttgatgagcaactgcacaatctacccgccgcccacgatatcgtattagcgcaggctgaggtttcgcaggtcagcgctgcgcgcgagaatctggcgttgcggcgtaaacgtgcccaacagggagaaaagggcgatgagtgagcagagctatcgtagcgcagggacactgttggcacagttggcgtccggagaaaccacctcagtggcgttggtgaatcactatttttcacgtatggcgcagtttaacaagccgttgaatgcggtggtgcagcagcactatgcgttggcgttggaggccgccgcgcgcgccgatcgtgagcgactggaggggcgcgcaaggggcgtgttgcacggattaccttgtactgttaaggagtcgtttgacgtgcaagggtggttaaccacgtccggtgcccattatctgaaagataaccgggcgacgcaggatgctccttccatcgcacgcttacgcgctgccggggcgatcctgatgggaaaaaccaatgtgccgatgatgactgccgattggcaaacctataacgatctgtatggcaccacccataacctgtgggataggcaacgttcacccggcggatcgtccggaggagcggcggtggcggtggcggcggatttcacccccgtggaatttggcagcgatttgtttggctcactgcgcattcccgcacactacacaggtgtctatgcccatcgttgtagcttggggttgatgtcggtcagaggacatgtgcccggtggtggtccgcaagcgactgatgagccggatctctcgacggcgggccccatggcgcgcagcgcggcggatctgcgtctgatgatgcgcgcattgagcacattctgggtggaaccgccgcgtattcccgattttagccgttatcaggccaaagcaaactaccgcgtgtgcacgtggtttagtgcgccccaccatgagatagatcaacagatcgcacagcgttttcaatcgtttatcgacaagttacgcgcacagcctggcgtggaggttgatgatgctatgcccgccgatatcgatcccgacgcactgtttgatatagcagtcaaactcagtggtcggctggtaagtacggcgctcaatggacgccagcgtcttacagccgggctggctgcgctgggcttcaggcttgtgggcaagctggcggatgtgcctgaggggataacgagctattaccagggcatgctgaaagacagtggcgaacagcggaatacagacaaactccgccacgaatacagccgggtgatagaaacccttttcgcgcgttatgacgtgttgttgacacctgtcagcccggtgctggcgtttgcgcacatgcagcagccggtgcgtaagcgcaagcttatcgtcaatggcgaaccgcaagattacaacgaacatttgttctggaacatgttagcaacggtttttggtttgcctgccaccgtttacccattggcgaaaacgatggatgagcttccgtgcggcatacagatcatttccgggcattttcacgatgatgtgacgattaactttgctgagttctgcgaaagcatcagtggcggattcacggtaccggaagggtactagaggcggatatcggtgacagcgccaataaaggtgcggcgcatttaatgaataaggagcaggtatgacggtgaataagcttgagccagacaacggcacgccgaacgatgagctgttcacggtggcgggtatgtttgacggctcgctgtataaattactcctgcgcatggcgttgccgatgtttgtcggtatgttaacgcaggtgacctatgccatcgccgatattttttggctgagccacattgatgtcaccaacagcggcatcattgccggtgtggggctggttttccccgttggaatggggttatttgccatcgccaacggcattcaaatcggtatgggatctttgctgtcccgcgccatcggcatgcagcggttggatcgtgcacagcggattttgtcggtcggtatcatcatcgcgctattctttgcgatcgtgatcaccgtacttggctatgtttatgcccagccgctattgcgctcactgggggccacgaagagcatcatcggctacgcaacggagttctattattattcgctgctgaccgtgttcagcatcatgttgattggcgtcatgatggggctgtttcaaggcgcgggtaagatcatggtcatcatgaaggcctcattgttgggggcgttggtaaatattatgctcgatccaatcatgatctttgtattcgattttggtgtgaaaggggtggcattggcgtcgtttctggcgcaactgagtatggtcgcctatttcatctacacattgatgggattacatatcgggttgagtatacgcatcgcgttacgcccattctcctggaaaatctaccgagagtttctctccgtcggcatggcgcagatgctgatgcaactgatcattgcggtcggcatagtgatttataatttttttatcgtcaggctggacgtaaacgcgatggcagcgtttacgctcactggtcgcatcgactatttcatcatcacgccgatgctggctatcgcgaccgcgttgctgactgtggtggggcaaaactggggacacggaaatgtcacccgcacgctgaatgcctattgggccgccgtcgcgctggccttctctattgtgctggtgttagccgttatgcatattgtactggcaccctggatgtatcccctgtttactcgtgttgttgccgtgagtgactatgcggtactgcaaacccgtatcatggcactggcactaccctttgtcgctatcagcctgttagcaagtgaatattatcaggccattggtaagccttggtattcggtgttgttgacgctgatgcgtcacgtgtttatatctgtccctgtcgtatacctgctggcgattgtgttagagatgcgtattaccggcgtctattttggggcgatgagcggcacttttgtggctgcgttgttggcgtggcgtctgctgcgtctttcacctcgtctgctgcgatggaatcaggaggcggtgcgctcccaacacttggatatggaggtggcaccatgatgtcgggcaatccgttgtcgtggccacaggaacagtgccacatcattgatcaactgtatccttacagtgccgtaaacatcattggtggtgtggtcaccattgagggaattgtcgatctgccccgactacacgcggccatccagtccgccattcggcaatttgatgcgttgcgtatgtggtttgtgatgggagaggagagtgaagtggtcagccaagtgcagccttatcactggcgcgatatccgccatttgactttttccccagattatgacaaggagaacctacgcccagcggcgatcgaaacatttgttgatgagtggttccggcagccctttaccctgctggcgcacgatttgttcgagtttgtcacctttacgtgcggtgaacaatacagcggttatttatttaaagcccatcacggcattgctgatggttggtcaatggcgttgttgtcaaaccatgtcaagcgagcatacgaacagcaggacgtaccagatgatgcgtcaccagcctatagcgcatttctggcgcagcagcaatcttatcaggcgtcaacgcgctttgccgttgatcgtggctggtggcgtgactatatcgacgaataccgcgactgctttccagacagttcccccatcgttactactgagggcatcagttgttccacttggcttgagccagccatgattaaccgtctctacaggttgtgtaatcgttatggctgtacgcttaatacgctgtttattgcactcttcgctctctatcgcgccagagtatggggggaggaaaaaggcgtaataggcgtgccgttagccaatcggcatactcgcgaggcgcggcgttgctttggcatgtttactaatcaattgccgctggcctatcgactggtgcgcacggaacgattctgtgaacgggtggcctttttccagcgcgaactgaaacgcggttttaaacacagcaaatatcccattaccttattcaaccaggatttggcggaacaggggggagggaagttgcgggcgttcgattattgcgttaattattataactttacctatgaacgccacattgcaggtgccgcgcaacgcgtggagagttactacagcggcgagcagtcctataagctacagattgttttgcaaactgttaataatcataaagaaagccttaggttgagtctggaggcgctgcgtagcgctttcactccgcaccaactgacagcgatgaaaaatgggctgttggatttagtcactgcattggatcggcaacctgacgctcgtctaggcgatctcgaagtctatcctgcgccgcacgtcgcattggcatgtggctcactcaaaccctcatttacttcccgatttgcagcgcaagttgtggagcatggtgatcgcacagcactaattgataatgaacagtctttgacttatcggcagttggatgacgctgttgagcgggttgcgcgttatctgcgccaacaggggatcggacgcggtcaagtggttgggattatcgctgagcatagcgctcaaacggtgatggttatttatggtattttgcgctgcggcgcggcatttctgccgctaaatcccgcgttgccaacgacccgcctttacgccatgtgtcgtaaagcgcaggtagcgcatatcctttacgatccggcgatgcatgaattgacgcaggcgctggcgtttcccgcgtccagcttgctccaggccttagccacttcggcgcttgctagagaaccttggccagctattgaaccgcaggatctggcatatgtgctgtttacctccggatcgaccggcgagcctaagggcgtgcaagtctctcatggcaatctggctaactatctccatttcgccgccgaacgttactttacagcgcaggaccgggctgcgctctactcttcgctgtccttcgatttgaccatcactacgctgttcgcccccttatgtgtgggcgctagcatcagcgtttgtcggcacgccgagagcgaaacattgctgcgcatggccgtggttgatcagcccaacacagtgatcaaactgacgcctgcacacctgcggttgttgtgtgcggctggcataagcagtgagcagattcgtaccttggtggttggcggggaggatttcaagcgggatctggcgcgtaaggcggctgctctctttcctcaggccgtgatctataacgaatatgggccgacagaggccaccgttggttgcatgatctatcgctacaccgggcaagaaacgctgccttcattgcccatcggtatggcgatcgacggttgccaggtagcaatttgctccccttggggctgtccggtaccggaaggcgaaactggtgaattggtgatttatggcgcgtcagtgacgcagggctatatcgatgcgccgcaacaaacggccgccgcctaccttaaagataccaatggggtgatgattggctatcgcagcggtgatattggctacgccatcgctcctaatacgctggtttatcagggacgtaaagacgatcaggtcaaaattaatggctatcgtattgagctgtgcgaaatcgaacaagcgttgttgagcgcacctcaggtagaaagtgcggcggtggcggtgattgatgatgtgcaggggcagcacagcgggttgctagcctgcgtgacaccgtcatctgttgatgtagctaccgtaatgcaacatctgcgtcagcaattacccacctacatgcaacccaagcagtgctgtgctatcgcccaactgccgctgtcgcacaatggcaaggtggacgtgcgtcagatggtcgcaacggtccgaaacaccgcgcctgcatcgggtagcgagcggctgggagatgcggcgataaggcattcagttcgggtatgtgtggaaggggcgctggagcaaactgagtttgatgataacgaaaatctttatgtcttggggttggactccatcaagagtatccagattgcagcgcagctcaggcaccacggctggacgatgtcagcggtgcaggtgatggagtgtggaacagtgaacgccatctgtgagtttctcgctagtcatacaacggtgtcacagctcgcgcagtatgctcataacacccgtatcgatctacccgcattgcgttggtttacgcagttggcgttgccagtgcccaatgtttataaccatgtcattgtgctgaaagtgttgccgggctgcccgctcgagcagttacacaacaggctgcatacattaatccagcagcagccagctttgcacagtgcgctggacgctgaggggcggttgctagtatgcgaccctaatgtgtgttatcccaacgaggtgctcacggaatattcgacggcgcagtggacgttggcagaggtgatcgctcagtgcaatagcatgcttgacgtgacaaatggtcgagtctttacggcagctctgttacacgccccgcagcctgcgtctagcacgctggtactctgtgcccatcacttgtgcgtcgatatgcactcttggtatttaatcctcagcacgctggacgccgtcagcactgtcaatggcaccagcaacagcggactgcatcgctggaatgactatctggcgagcaaaacggtagattccgccacacacgaaagctggcgcacagtatgtcaaacgctaccgctgcatttcccacccgtgtcattgccagatgactcattacctcgtacgcgcgcttggcgtgaagactttcgccatccttgcgtcaggaggttgtttgaatccagtggtaataccgcgtacagcgccgaaacctatgtgctaacggcattggcgctggtgctgcgttactacagcgaagagccttggtgtcgcatcgagatggaaggcatgggacgcggctgctggcccgatgagcctgacgttgcggatacggtcgggtggtttactctattttatccttgggcgatccctctgcatggcgatatggcgacactgttatctgcgatcgcttccgatttggcaaaacgcacgcatggtgggggagattacggtctgctgcaaatgcggcatgcaccggaagactctcttgcgcaagggatccgaatgaattacatcggtgtgcaggcgcaaccttcactccgctattttcatattgatcactttaatagtgatatctataccgcgcctgaaaacgcgctcggctgcgtgctggagtttaatattgcgcgctcggcagctgatggtctctccttccactgccgtttcgatcccacgcgcattgcgctgaatgatgtgcaactcctgctggcgcgctacaagaacagcctcactgatctggatgcctggctgtgccaacacagcgccacgctgacgggcgcgccgactttgtggacactataaacacgatgccaacccttaaggaatacaacaatggcaaaggatgattttacctgtggctcactggatattgccattattggcatgagcgggcgtttttccggtgcggaatcggtgcccgagtggtgggataagttgctggcgggtgaggagttcactcaaccgacatgcacagaagacgataatgggaacccttggattaggctgcgcaatataatcaccgctccctatgacttcgatgctgcatttttcaatattccgcctggcgaagccctgttgatggatccgcaacaacgaatatttcttgaatgctgctacaacgctcttgagcatgcgggctatattcccacgcaacttaagcgagtcggcgtctatggggcgacctacgccaataactattttatcgatcgcgtctatccatacctgaagatgagcggcgatcaccattatcttcaggcgcagattggtaacgaaaaggattacttgtgtgctcaggttgcctacaagttggggtttaccggacccgctgtgagtgtacagaccgcctgttccagttcgttggtggcagcatatttagcatgcgaggggttattgacttttcaagccgatgttgcgttggcaggtggggtcaccttgggttttttacaggcgcacggctacagtccgcaaggtgataagctggtatcgcaagacggacactgcgccccgtttagcgctgaggcgaccggcacggtatacagcagcggtgcgggagttgtggtgctaaaacgtcttgaggatgcactacgcgaccaagacagagtgtatgcggtgattaaaggaggtgcggtaaataacgacggcgggcgtcggctggggtttgtcgcccccagcgtagaaggacaggtagaagcgatcaatacggcgcttgccgccgcagaagtcgtaccgactgatatcgcactgatcgaaacgcacggtaccggtaccccgttgggtgatgagattgagcttgaagctctgcaccgggttttcgcaccggcatgtgcgccgcacagcattcaattgggtgcggtaaaagccaacttgggtcacctgggagtcgcttccggtatcgtcagcttaatgaaaaccgcactgacgctatatactggtttagttcccccgcagatcaacctagtaaataaacataaaaaactgttgcagccagcctcgccattttatctcagtgatgtagtgacttctgtcccacaaacgaaaaggatccatgccaccgttagttcgtttgggctgggagggaccaatgctcatttggttctgcaaaactggtgcgagacgcctgcgcaagcggtgcaagaaaatgagcgccgcctgtttttcttcagcgccaaaacgccattagcccttagacaacagttggatgctcattatcacgctctggcgacctatgcggaagcagataaagatcgtatcgcctatactctcgcgcaacgccgggcacatttcccgtatcgctgtgcgctggcggcagacagtgtggtagcgttgcgtgcaagtttggcgaaactgcgggatgctgacatgtcttttacccctatcaatatggaaactaccttggtgttcctatatccggaccgggacgataagctggagagtgccctgacgcatttgctggcttgtcaacctaacttgcgccagcggcaccagcgcctgtctcaggatgttgcacaaatctgcgaaccagccgattggacgccagcattgcgtcagtttatccagcaggtgagtcttagtgaatggctgatcgaacaaagtatctcgcctgtgcagcacatcggttacctgacgggggctgcagcagcgcagtatgttgcgcgcatcatctcactggaaaacgctgttcagcaggtgattgtggctgaaacgacaccggagcagacgctggccggcaacagtgaactgagcgaaatattggctaatctggcggtgacggagggaacgctgatgctggaaatcggtcgcgcggggacgttttccatattgtatcaccagcatgcgcagtgggttgggcaaacagtattttcccccatgctgaatacggatacgcctgaggacatcctgccgctgttgggcactctttggcaacgaggagtgactatttgtttaccggaaatgccagccgtgcagactataggcttacccggttattcgtttgatcgcgtccggtatgaaattcagtccagtgatgcgagagagaacgctatgttaccagtgagttatttgtcggtcagcgactttgtggagaaaacctggcgttcattgttatgcatcgatcattatgacgaacacgcggttattttcgaatacggagcgacctcgatgcacgttatctctttcgtcgacagctgtaaccacatttataaaatcggactgactgccgccgatatttatgccagacccgctatccgtgagcacagtgaatttatctccgaatgtgttgatggtattttatgaggtgttcacaggatgacaataatggaacacgttagcattaaaacattatatcatctcctgtgctgtatgctgctctttatttccgctatgtgcgctttggcgcaagaacatgagcctatcggggcgcaagatgagcgcctgtcgacattaattcaccaacggatgcaggaggccaaggtcccagccctttccgtaagtgtgaccattaagggggtacgtcagcgatttgtctacggtgttgccgatgtggctagtcagaaagcgaatactctggacacagtttacgagctgggatcgatgagtaaggcgtttaccggacttgtggtgcaaatactgattcaggaaggcagactccggcaaggggatgatatcattacctatctgccggaaatgcgcttgaattatcagggaaaacctgcttccctgaccgtggctgatttcctttatcatacatcaggattgcctttttcaacactggctcggctggaaaaccctatgcctgggagcgctgtggcacagcaactgcgcaacgagaatctgctgtttgcgccgggtgcgaagtttagctatgcctccgccaattatgatgtgttgggcgcggtgattgaaaatgtgacgggaaaaacctttacagaggtcattgcggaacgactcacgcagccgctgggcatgtcggcgactgtggcagttaagggggatgagattattgtcaacaaggcaagcggctataaactgggattcggcaaacccgttctgtttcatgcgcctctggcccggaaccatgttcctgccgcctatatccatagcactctgcctgatatggaaatatggatagacgcctggttgcacagaaaggctttgccggcaacgctgcgtgaggcgatgagtaacagttggcgtggtaatagtgatgttccgcttgccgcagacaatcgtatcctctatgccagcggttggtttatcgaccagaatcaaggcccttacatcagtcacggtgggcagaatccaaacttttcttcttgcattgcgttgcgaccggatcagcagattggcattgttgcgctggcaaatatgaattcgaatctgatactacagctttgcgcggatatcgataattatctgcgcattggcaaatatgctgacggcgctggtgatgcaattacagccaccgatacccttttcgtctacctcacgttgttgctgtgtttttggggggcggtggttgtagtgcgcggtgctttccgtgtttatcgcgcaacggcgcatggccctggaaaacagcagaggttacgtttacgcgtacgtgactatatcatcgccttggcggttcctgggctcgtggccgccatgctctatgtcgcaccgggtatactatctccaggacttgactggcgttttatcttggtatggggtccatcgagcgtgttggcgataccgttcggaattatcctgttagctttcgttctgacattaaatcatcaaattaaacgaattctattacacaacaaggagtgggacgatgagtaatatcagtttgtattgtttgccatattcaggtggttctgccgccatgtattataaatggcgtagcgtgctgtcggacaatattactttgcggcctttagaacctgcggggaggggaactagaatacgccagccgctgtgtcttacgatggtggatgccgtcgctgacctttatcaacaatttgtgaaacactacacaggtggagactacgccatttttgggcatagtctcggagggatcatggccttcgaactggtgcattatattctcgatcatggacatgacatgccatgcgcgctgtttttttccggctgtcgcccacccgatcgggcctctcatgaagtaatactgcataccttgcccgatcaggcgtttatggaagagatcgtcaagctgggcggaactccggttgatgtctttcgtaataaagagttaatgacaattttcacccccatcattaaaaacgattatcggctctatgagcagtatgtatttcaggccaaggcgcgcacattaacctgtccgatcgtgctatttcatggcgatgctgacaatctggtaatgcaggatgaattacttgcatgggaaaaattcaccacacgaaagacgcggactattatatttcctgctgccgatcatttttttgtcgataagcattttgaacaggtggtaggttatgtgaaccagacgattgaatcactcgaaatagtagggtagaaatagttgtgtaactatacaaggagcaatagatatggctgttccatcatcaaaagaagagttaattagagctattaatagtaatttttctttattaaataagaagctagaatctattacgccccaactcgcctttgaacctctattggaagggcacgcgaaggggactacgattagcgtagcgaatctggtttcctatctgattggctggggagagctggtgttacactggcatgaccaagaggcaaaaggaaaaactattatttttcctgaggaaggatttaaatggaatgaattggggcgtttagcacagaaattctaccgtgactatgaggatattacagagtacgaagttttattggcacggttaaaggaaaataagcagcaactcgtggctttgattgaacgattcagtaacgacgagctttacggtaaaccttggtataataaatggacccgaggtcgtatgattcaatttaataccgcctcgccttataaaaatgcttcggggaggttaaataaactgcagaaatgtcttgcagaatagcggggtgcttaccgtttgcctccccactgatgatttttccgggcagcgatgagtgtggactggcggcactatcacccgctgctccggaacatattctggttaatgatacggataaaatgtgtaagacaataagtctacttaacataagcacatgcgaacgcatgtgtattaagaaccaatcttcataataaggtgattttttttcgacaagggtgctcaaatcgggatgatttttcgtatcctgacgcaggaggatcaaattctgatgtcggatattgctgcactgtatttcactccgagcttcgctgggaaaatctattgccgcgaggcctttcctctgatttggtacgagccaggatggagggtaatgtgctgggattaagatggtgtttgatgatacagtgtctccctgcaaggcaacggggagtcctgcaaaacgcgttaaagtcgctctttttgcctgcgccgggttcccctacagctatttgtgccggccggtgcagataaagacgaatgatatccagcaatttcaaaggagcaagtgcatgaatgataccgtccatatggcccgaagttcagcacgcagagttctaacatgcgatcatagggaattttggtagagggaagctaaagaaactgttttggtgagtcgctttattgccattcgcatgagtggacgaataaagcgatgatgaatatcgccaacattggatttctttcttcggattgcatcgttatacccgaagtccccgtggtgaaaaaaacgtccccggtggcacatcttcccttatgaaatttagatgtgttatgccgacttgatatttatagttctgttcggtcgacttttcaggcaacatatcgtgtactcgatttgccaaccatctctgtatatgtccaatgacttaatgtagccatttgttgtttccacattattcaaacttcatgtgccgctcagcgagtacagcaccgttgttgaaatccgctaacaaccatatggtttgacctttatataatcgcattatcatcattgtattactggaggtcatcattttactgaattttcattcagtttatgtcggtctaagactcacttgttgtcgcaaatgccactcctgagtgcagcgggggggagatcagatgacgactacatccagattctacaacttgttctgcgttgatatttagccgctaatcataatgttcctaacttacggtaataaagatctgtttagttggctatggtctccgtcagtttctggacagccaactttaacaggttttgcttcgaccgctggcggttgcttgctccagttcatcaatggtgcggaaaagaaacatttcgcggttcctcgtgtcgaacggcaccggaacgttgttcctcattaccgttttgatggagtcaaacagccggattaacgatgttttggttttgtcatccggcatgacatacatcgcgtagtgccagtgtccggcatcgctggccgccagatgactgttaatgatgttgatatagcgtgcgcgggttttcattgagcgctccgtttcgacggcgacgattgcgccgctatctaacgtgataatcccgtcagggcgatggcgaacaccaggataacgcgccataaactccccccgatcaccattaagccagccttgcccgcctttctcttccagtgcaattctgaccctctgatttagtagacgatgttccagagtccagtatttgagtttgccgggttcaaagtatccagggaaaacagcatcgtcaggcatgaccaccattgctaacccctgcatagttatcccccaaatcgttattttttgttttaccccaggcatttcgtgtttgatgatgaagccagctttaattgctctatttagtaccttatataatgggctgtgagaatttttgctaaagccgagaacacgtcttagtgtgttaaaatcagaataagtttcttctttcagaaaatttagaagggagagcattttgtcagcagaggctttttttctctctgatacgttatgtataagcatatcaatccttacaaattaatagatggcttattttgttcattgatttcggtttgtggttgttcagattgaggattttcaaatgacagcaattcaatatgtttctttttaaccagaataggggacatctttgttgccttcgccagttcttttgttgtaaatacaaagccgaccttttcagggagatttaaaaacatattactgtcaacgtagtaactttctgcctgtcttatcatacggtctgtatccattttttccgttaatgataaatcagtccttactttcctcatttcatcatcgaccaggattgaacctgtcatttttgccgcccattctgctgtttctggattttgaattttataaatcaatttgaatttggcgttttcaatgatggctccaataactgcatcaccatttaaatcagacggacagtcacgcagatcgtctatcgcctgaaaagccatgaatatatgcacgcctttatctcgtgccgttccaagcccctcaagggcggggcgggatagatgatatttcaattcgtcgagaaaaatagcaacagtacgcggggtgctgtttattctgtccctggtctctgctatttgtatcaggcgggtcagaatcatcctttgtgcggatattattttttgatttcgtgttgaaccaataatgtagcaacaaccaccttcatcaaaaacctcctttaatgaaaatccatttgtggcattaattgagttaactaaagcaacttcttccagctcaccaaaaaatgcgggagcagcttgacgtaatgactgaacaaaatcagtgttaaataaatcataaagtgtcattcctttttcataaattgctgatgtatttctggctgcgcggcggtcagagattcgataaaaatctgaagcttccccttttttagccagactaaagccagcgttaaatagttcctccagttgttcatgagagatatcagccagtaaatcaagctgaaaatttggcttgttcaaatttataagtgtaaatttcttgcccgcttttttacatgcttccctgagtacatgtggtgcccattcatcatcttttggatcttctacaaaaacagcctcgcctgcaagaattgcctgataaagtagaatggctgcagtgacacttttccctgaaccagttgtgccgataattgctgcgtgttgggtcttgaattcttttatggttatgtattgcggctggtcatttttgtttaagccaatgaaagcacctttctttaaatcaatgtaatcgagtgggttgtattctatgctctcgggcaacagctcttttactttacgtacatccgttctggtatttctctccagcttggttttcttaatcattcgatgtttcaggttgtcaatttctcccgccagaagtcgtcgggctgcaatatgaaagaataatcctgctgtcgtaaatgtgactgtcatgatccatagtggaattctgaacagtatgttgttgtcgagtaatttaaaaaagtagctcagcccctgaatagttagcggtgatatggtaccgaatataaaaaagaaaatagacacacacgccaccgattttaaccagaacggagcgttctttctttcctctcggggaaggttgactataaacggtaatgtaagacctgcgaacagggataatatgacagggctgttttgcagccataacaggaaaaaggaaaaggcgtcagcaaaagcattcagcctttgcataagatgtgatcccatatttgctaactccattaaaaatcgtagtgatggggtcaagtcatggagtcatcgcatggagtcgcagcttgactccatgcgatgactccatcaaatgactccataaaacagaaaaagacagtgatcgccagtggcgatcaagcccgttatccctgctttcagaaaacagccgaccagtggtcgtctgtcctctgaaacgcccgaataacgggcaacggcgtgtgtcattacgttcgggctggacgccctcactgcatggcacatgggggtaatgtcccggctggacgccggaccaaaacccccagggtcaaaggcggcacaccgtcgcgcgctacgcgcgaccaacccctttaagacgcgcgtttagcctattttttcttcgcaagctcgaaaaaatgggaacgctgctttaaaggggttggtcgcgcctaatcggcatattccccgctggggcgggaaatatagcctggctgcgacggtgtgcggggcaagccccccacaaaaaccggcacgtgggcgtgcctttttgctcgctggggcggcaaaatttttgcggctccccccggcccgcttcaattcgctggggcgaatgttcgcgggtggacgtggagcctgaaaattagcaatttctccgaaattgaattttctgtccacgttccacttcattatttttcgtcttaacaatttcttcgaaattgaagccaaaaataatgaagccttaaaaccccgtcgcctgttagcctgtgtgttgtacaatacattttttgttctgtgtgattacatctgttcgcggtatatttcagctctgcattccatttccgcttccagcacctcactccaggttgtatcatcaatttttgtgcctttactttctgcatacctcattaatttgtttgcgtcagcttcattaagttctgaaagatgagcgcgcaaaaggccgattaatctgcttgcgtatatttcgtaatacagcccgcaacctctgtgggcttcttttgataacgtgtcatataccagggctaccgatattctgtcctgattgcgggagtatatatttcggatgaataagtcttcttttggcatgtcgcaccttttacagtaaacaggatgttatacggattattactatcctctgaccttaccgtacctggacagtattttatttacggcctccggatctgcgtcgggacattcaccaaggaacgcttttctcgccttcaaagtatggttgggtaagaaaccatgtttattctttttgactattttaaaaaaagccttttctgcagaacggcattcacgcccgccactattacccgtagcttttccgtacatacaaagaacaacttcgcacgggtcagcggcaaaggaataaactggggttcctgctgccagacatagtgcggccaccgcgataacggtttttttcatggtaaatccttatcagattgtgttttaaacagattagcgagagaaataaatggtggtttccctgcacgtcaggcaattaaaaacaggctggtattcaatgacgccttttgcgccattctggcgaagccagtttctggcattaaagaaatcagtaccggattgtgcagagacgacaattcgtgttgagtgggcggcagcgtaaaatactgctggcgtccatgttgtgtcgtggaaactatgtgtgctgactgataatgtccatttaccgttaactgtcggggacgggactgtaacgttattgtcacgccattgcggtaaacgggtgtttaatggctcagcggctttatcccacgctacaggaacgggaggcggcggcgatgaacatccggtaattattgccgccaggatgatgactgtcattttatttgtcatgctttcatctcctcaaaatattgattgcgatgggccgggcggaaataaatgtcattcatacggcggacatctccgtccaaatcaatgctcactatcacgtccagactgtccagaaccttacgcaacataaatgtataggggagctgggcgcactgtgggttctcgtagcaacgggtaataaatccatctattgcttcttttgctgacccggcatgaatggaggtcatgcttccttcatggccggaacctgtaattttgagaaaatcccaggcttccgcgccgcgaacttctgtcaacagaatgcggtcagggttcatgcggtaattccagcgtaaaaggctcgccggagtaacgacagaccctttttcatcggatgactcagaaggataaaacaggtgaacgtagttcctgtgtttaaaaaatattatctccggattgtcttctatcgtcgttatgcgtaaatggacagggatatactgtatcaacattttcatgaatgttgttttccctgaaccagtttcacctgcgacggctaatgtttttccatactccacgcatttctccataaacagaggaatatttctggcgttgtacaatgcaattaattcttcgtcgtgtgtctccgtcttctcgtcgtttgttacccggttataaaatcccgcatcgatatatccctggtgcgggatttgtatcttcgagggcttacggatggtgacagacaccgtatcgcgctcacaggccggaggaacaataacctggcaccgttcgccagattccagcgtggctgacagtcccggcttaatatcttcgatattgtcgccgtggtgctttgccaggcaccgggcaaagttgtagcaatcctcatagctcaaaggaacggcatgctgttcccacatgccgttgattttggtatacagctcacctggacggttgacggcgatttccgtcaggccgggaagctccagaaagtcgccaaagaaacgctgtttatagcggtcgagggagatatttttagcggtcatcttttacctctttcatccgggaaaagacttcatcaacagaaagaatgaagagagaactgactgctaccagccaggcaagctggagtaagccagacacactttttcctaacatgatcgcttcacggtcagttaaagggcgcaggtgataccagatttgattgatggccatccacgccgagggcggtgcaaacagcagaaaaagaaaacccgcgataagtaatgcaagtggtgcatcacgcaggctctggccgacaatacgtgcaatgtacataaccagaatggctatgcgtttcttgtttgctctcgtcataacgtattcctttattgtttgattttcagtgtgtaaatgtttgaaaaatcaatatcctcgcctgtgatcaggttgatgatctcgccctgattcttatagagcgttgggggaatattgatgctgttctccagcgtggtacgcgccatatctgccatagcctggcggctgttttccgtatagtccgtattgcggtcttttttacccgcactgttggatgcccatgcgccaatatcggggatcatgccgaccattaacgcgccgccgaaccgttcccagaagtgcgaatctatccagccatcaacgccagcctcgcccagatcgccagccgcgctggtatcaaccaacgggatatcgagataaggcggctggcgggtgcgtagcttcgtcgcaatgatgaatgcccgcccttgcccgtgcttcataccttcttccgctatggcgcggtaaagtaatgatgccgtggtgcctttctctatcagcttcgtgttgccgctggcgctccagatgtcagtagtgaccgtgcagcgaagtttccccgcccggtcagatacaaagcggcgatccagtgagcaggggatcgaggtattttccgggatgtacaggtcagggttatagggtatgcggcgcactggtgcggggctttgtcccggcggcggtgcggcggtatttgtggccgcgctgctgtcctgttgtccggtggtcgttgccgatgtcagcgtcatttcctgctgccgggtttttaccgggttctgtgtggtggccgaaccatcacggcgaataaggaagctggctttgttgagttctggcggggcggccggagccacctgccctgttccccccgtgctgctctggccgttatcctgttgctctggctcttcttcggctgtatcggtggacataccgagatcgttacgctgccggtaatcggttttgttcgtctgcggggctgtgtcctgtttcttttcttccgtaggctgccacaggatattgcgataaacccagttaccaccccatgccaggaagataagcgtgaccgcgacaatggcaagaaaggcggttgctttgccccgtttgcgctttttcagcttgttaacggcgggttgtaccgggtctttctcttcgtcgtcctgcgcattgagaagctcggcctcccttttagcgcgggcttcccgctcaagcgtggcaatatcatcctcagcgtgtgccgggaatgcctgcgcttcatccggcacaggcattttgttttcgtcgttcatatgcacgtttccttttataaaaatataaaaatatttttataggttaattggattccggtttttccactctttccacctgccgggatacggtggaaccatcggcggcgtgtaccttgccaaatccgctattttccagacccacaacggcattaccggaacgcagtactaggcgtggcgtcacctcctgaatcaccagtacggtgaaatcgcctttcttctggatactgctgttaaccacatgctctttgccgttcagctctttggtgacggaaggaatggacttagacggggagaagcccacgaacgtaaagcggccatcgtcgtaagcaaaatcgggaacaatgttgaaactgcctttgcccggatatttggtgtaactccagttgcggggcgtctgcgccgagttcagcgctttctggacgctggcctgttgctgtttctgctcccactcgcgctgtctggccgtcgcctcccggctcgctttgtcccgttcttcgcccggatagcgatagctcacctggaaagcgggttgttgtgccgatttatcatcgatgacgttcagctcgacgttgtacaggcgcttactggtgacaaccagcatattggtatgccagtcccggctgttcggggggatcacgacctgcgttgtgttgccatcttctccgggcgctccctgcgtgagcgcgaccgggcgaacgttgacccggtttgcatccggcgtggcttcccacgcctcatcaaagccaggtttggcgcttatgaccgcctcatcgttatcaaagactagcgttgtcataaagccgggtttggtgttaacgacagtgacgttctgcgggttatagataacctgctgcacgcgggagtcatagcggcttgcctgcggtatggccgcagcccatgccgcgccgcacatcatcagtgccagtgcggtaaacgttaactttttcatcattcacctccccggatttcgcggtcggtctgccaactggtgacggtaaagccgaagtagttgatctcgcgttccgcatcgctcatttccttgtcagggttagaatggaacgtgaaccgggcatcccaatattcgttgcgggtgctgttatcagccagacggcggataatcttcttgtagcggatggtggcgaccctatcaggggctgtcgcatcggtgatctggttggacaagatctccactttcacggtgtgcgccccgttcttataaaccttgtctggggcgttttttccggcgtaaagcgccagatagtcatcgtttacctggggagcgttgtagacttgtaccgtctcgtagtcgtcctgcaaagagggatagacataccgctcacgcactttgacgtagtttgcggccatcgccttttgataggcttctgttgcggtcaggctggttttcgatgtccgggtaacgtgttccacccgtcctgtgtggttatccaaggtatacagctcaacgtccgtctgtttcagcggcaacatcacgaccacggcgacgagcgccagtaccgcaatcagcagacccataccgccaacaacaaaaccggcttttgtggcgcgtttatcccgctcaatcatttgctgctcaaaagtgcgggattcagctattaatttctgttcactcatgactgtttaactccgccataatttgaggggtgtttacgggttctcccttaccgctaaaggcagagggaggcgtgttctgggcgcagccagaaagcgcgcacagcaaagccagcgcaatcaagcgtttcatcaatgatttcctcaactaaattagatatatgaaaatataattatattttcatatgatgatatttcggggggatggacgggagacgtctggcctagctgttgaacttcttaaccgcggattctctcgactgtgccagcctccgcgcttcgttccgggctatcatctgctcaatcgcgtacttccgcgctttagatgcgttatagcctaactcacctccgggcttgccgggcttacctgcattcgcatccttccagccctgaatgttgtcctgggcggaacgtttggtttctttaactgcacccccggctagcttcccggcaccaaaagcagccgcaccgatacctacagcggccagcccctgcatggatacggtagcgcttgccccggccagagctgcggctaccttagcggaaatatacaccagtattgcagcgaaaatacctgcaaggcagacttgagcaccaagttcaacaattgttgaactgtctgctaccttcgtcgccttattaagaacgagattcaagtaattcactacaattctcaatgagagagcggcaaatagaattgttaatattcctgcaaatatattttgcaaccagttattgaacatggggcggaggaaaccatacataaggcagaatatgaaaataggtgcagttattcctaatagtagaatcattacttcggcaaccattgaaacaaagcccgctagaatcataagtgcgaatattccaagccatacacaaaattgagcagtcattccctcatcttttacatatgtagaattatccatgtcatgtagcgttttccctaacactttagccttattccatagggtgtctaataactgccatatattatcactaccagaaaaaccctcctttattccgtttatggcatcaataacgccatcgaggtagccgcctaaattagccacaaaggacaggatgatcgccatcctcatgatgtcccacatcgtgtcttccataggcgtagatagcttaccagccaaagtctggtatccacgccacatgatgtagatggtagctgacgctgctgccagccccatcatcatagaagagtacgacatcatcaatccctttgtggcgtctgtaattcctcctatcaggtatttttcaaccccaacaaaaagaccgccactcatatattactcctctaaattatttaagtctggagttggtgcgtttagctgcttgatttgatagtgggcttcatttgcattcttgcaattttcagaagcgtcaccactcttttggcacttttcataaactagttttaattcgtcagggtgatccctataccattttgttgttttagcttcctctttgcatccaacaatagaaaagcacagggtgatcgtcgaaattaaaataattttttttgataacataaatacctcataaattattaaggtcagcagttggcgcgtttaactgctgctgattccactgcttaacacgctccgcttctagcgcattttcgcgcttctctgctgctttcacgctcatttcccattgggtggtaagcgtgttcagcatgacagattttagctgaatactgtttgcaaggtcttgagattctttcgaatctttggctaacgctaccctgttggagagactgtttatttcccccagggtctggcttacctggttctgaacctcgtcggtttgctcaagctggatagccttgttgatgacctgctgcttgcatacgttggcataactccccgattgcgcagtgttgcaggtgtcgaaaattttatacttctcgtacaacgcatcgaactgcccggaggaaccgccggagagaagcaggtcattcagtgcctgtccgggcttacgcagcttttcaaggtcagctttcaggcctttggcctggtcaacaaaatcagcaatatcacgaacgccagtggccgtcgccagttggtctttatatgcctgtatttgtgactggtagtgtctggccgtttccatccagcgttttaactcctgcgcccactgcacgtcccgcatagggtcagcatcaacagcgacgggaataccagcatgagccagtgggcttgcaatgacgcaagccagaataagagtacgaaagcgagttttcatcgtatatctcctttgggtcagagcgctttagccaggtaggtatcgagccattcatgaggctgcattccttcccggtaaatcgattcgaatatttcgaggttgggggcatcgccgctcatgactttggtgtatctgccgatacccgacaggtcgagcgtgacacgagcggcaaaacgtttggtatcgccgcgcttgaactgatttttcaccacaacatactggcgggcttgcgggtcaagccctttcaccacgtcgaacacttccggttcaaacttcataccgtcaacatagtgtgcgcggtcggcgttggggttcgccgccagaatctgtgtcccgcactgctcaatcactgccggggcgatatcatctttgatgatctctgccggggattgagtaccgacgaccagcatcccgttcagcttacggatggttttcagcttgttataagcaaagtccttaaacaccgggtcgcgtaaccacttccagaattcatccatgaaaatgaccaggcgtcgcccgtcaagcaggctggtaatgcggtacagcagataaaacgagattggcgcacatacgcttgcatcgtccaggaactccgttccgtcgatgccgaagttatcgcagttgctgatatcgaacgtgtcagactcgttatcaaacacccagccgaactcaccgccctgcgcccactgtgacaaccgaatgctaaggccgttttcctgggcttctttcgtagccggctcaggcaaattttccagcattcgggtaatgccgtagacgcgatattgcggctcgtcattcatcacagcattgaccgcatcactcagacgtcgttcatcgcgtggggagatcgtcgagccgttacgggtacaaaggattttcatcagttgcttgatgaaattgatattgcgtttggttgctggcaacgagaacgggttccaccctgtagactcaccactgataacccgatagtaacggccacccagcgcccggatgttcatctctgcgccccggtctttatcgaggtaaacggttgtcagccgtttggttttggcatccggggagaagctatcctcgcgcccgtatttctgctgcatgatctcaaagaacgtcatcaacatggttttacccgaaccgttcgtaccgaggatgcaggtactggccgggttcttctcgttgaattcgtccttatctgccagtgtgttatgcaggttgatatagtagccatcgcctgacggggtgcgcagtaaagccatcgcatccccccagggggctttatcgcgcttgcccggatagaaattatggagcgcggccagctccacaaagttctggctactcagctcccctttacgtggcctcaggttgtagttgcctggcagttgcgccatatacgccgctgaaagcgatatttctgccggaacaggcgttatccctatgttgttcagcgcgttactgatttcattcgtatcagcaaccaggctttccagcgacggggaatacaccatgatggaaaaatggtgcttgccgtaagcgattttccccgatgtcagcaggtcaagcgccacatccagatccagccgctgggaaacagcatcgtcgtcggcactcatcaaaaggcgacgggtacgcttaatggctttcttcgcttcctcgcgtgacatgcaggtataggactgcgtgatcacgtaatcgcagggggcgtaaagaagggagtccatcatccccgtggcggtctcttcggagaactctttaacctccagcccccggaaatattgcgtaccgttggcgtggtttatctgcccggattcagccgaaaagaacaacgccgccgcccccatcacgtcataggccggggtacgggtgacgcgcacttttcgccactggtgcgttagcagatattcatagaaagccagttgcgacgaaaacaccgcgtttccttcggtaaacgtaccgagaggtcgcgcaccatagcgcgacagcgcggtatcgagcgtgctttttatttccagcatttccagcaaagcaccgtccagctcctttagtttctggctgtctttcatccgtttgcgttctgctttttcaaggctgacaaacgggcgatagcagaccgtcaggaacaggcggttgcgccggaacagaccgacagaagcgtagtaaagacggctaacttcatcggcatacgggttgccggaatctttatgaagattgtcggtaaacgtattgcggtcgttatggatatagaaagtaactggcataccttcgaatgagcggattagcccgtgtaactggttcgtcccgaactggagcgactcgtcagactcgcagtcgaacggcgttcccatcaattcccaggtgcagtacagatcgctcttaggggaacgaaccacatgctgatgaatgtgcgatgagtacgggatgtacttcttgatggtggcacactgatttagtttcatggcgtcgagaaactccttgatatcaacatcatcatgctcaacgggcataaatgttgttgcgccaaataaacggtttgctaccggctttcccttcgctctcagccatacggcaatcagattgaaccgcatcggttcatttctggtaagggacttcatcaccagaaattgcacaggaagtaagaacaggagagcgacggaagtccagatagcaacgatgatggttacacccgtgacagccagcaggggcaccattggcaccccccacagcgccgccgggcgtttcattgccttgagcagctttgccatatgttcagcctcttagctcatcagcagagcgccgatttcactgcctccgccaattaaaatgccgccaatgatgatgtagccgcactgcgacaggctctcgcctttccacagggtcttatagccaatccagatcacggccacggtgatcgtgattgccgccagaccatgcagcccggttgacactttttgcatgacagtatttgcccgctgaaatccgtcggccagtgccggggttgcagaaaaagtcgtcagcgtacaggccgaaacgggggggaccacagcttttagcttgcggaaaagtatcattattcctcctcctcacggggtgacagggagaaactccggcgcactgacggcgcggagaacggtgcgatgaagattttttcttggcggagtttcgcagggacgccacggacgacgactccgggccagatcacgtggtgacgggatgagtcactggcaggggcggttttcaggggaacggcaactgatgatttgtcctcacgggttccggggaccgcatagcgggatgatcccggcggataaccgattcgctggatatagctcgttccggaaaacgccgtttcaggttgttgcccggtactgaaattgccggaataataacaactcagcgcccttttcagcgtgccgccgcgccggtagcagtctctgagaatgtgttcgaagacggacagattggtacagggatcaagtagctctgtggcggacacaccataatggcggaaattggtgctggtgatttgcatcagcccgacagagtaacggcgatcctgtgctgacaggcgacggagaatatgctctgcatctccccggctggctggcaggtgagaaataatgtgttgatcgccgaaagaggggccggccttcgggacaatctcagcgatggcataagggttaaaaccggattccacccgtgccacgtcgaatgccgtggacggatgaatgctggcggcgcactgcatggctatcgccagaaaggctgtggtggaaagcatggtgacctcagtaaacaagtgacatgcagggtctgctgatactgcatgctgtgggaacagaattaagggtggttacgacacggtttcgatggggcccgtattctgtggtggattattttcctcccggggctcaagcaggaccagtttgccggaaacggcaataccgggcgtcaggacaatattcagaccggatttaccgtggtggggaaaggcgactccgacctttgtccaccaggtatttttctcaccctgagagtccggatgactttcctgggcaacatacgcgtaataaacaggctttctcataatgtcctcgtttaattaaaattgttgaagatgatttcttcgatcacattccgatcctgcattccggttttaacgggtcagcgagaacattcagcggcaccctgaattatggttgtgtgacagcccgctccatattgttaaagagcatggtcaggatgcaggaggggtaatgaaattttaacgggaaaataaataccggaaggaatgataaaaaagtatgtgaaattaacgtattactggcacggtgtgtgtgtgcatgaatgatgacgggcgggctgataataatatttgttgattattatcaggttaaattaaacatccggaggaagactttctttatatgtcagatggggttgtatgctgtctctgtggctgaatttggtaacgacaataatgtgtaaggcgtgaaagacaggaatacagtagtcccttttgttgtaagggacggtctttaatctggttaaacgtttcccggccacttaggccgatacttaccgggccgggtggtgaaattcgttttcatgccgcagtggtgtccgtctgtacctgttgcataaaaaacacagagttatctgacatatttccagacattaccgggaaccttatcaaagtactggttcattacaatctctgcgcggcgataatctgctgcggcataaagcatttcaagctcattccctgtgagcttttcttccatatgcccgacaaccttttccagcaggctgccgtcatttatttaccgcagttttctgacgaattccatcttgtttgccggtttgttcatgtctgacctctggtgtactgactgtaaaaaaggattgccacagcaggagatgtgagcaggttattcatccatgacatggaggcacgggaacctgaaaacaagccggctggtgcatattaaaatgtgcggagctattctcctccgcacatacagatttaacgtctgcgtttctccagtatcgactgacagtcagtacaggttgttacacccggcagcgtctgacggcgtttttccggaatagccttgccgcaaaatcgacagtgctgcagggaaggtgtcggtgtgggtcttaaccggctttgttcaatcagtgcttctaggcaccgttcattaaacgcctgatcgcgatcgatttcatctggcacgttgtattctccttaccgtgttctttctttcgcaatgcgtgatgcagttccagacaacggtcagcgagggggcagtacacgatgaaaggttttctgtaacctgcatcatggcgtccagcgcctccggggaatcaatgttttcgacccgatatttttgccactgatgccagattgcagcatcggtttcttcatccggaatgggtgttctcccgtttggaacggagacaccgagtaaccggcggcgtgcacaggtttctctggagccaaccccgaaataacggttcatcagtgcgattgagccccccagcctgacagctctgttcagttgttcctgacgcctgttttcctcgtgggatgatgccagtaatttttgcaggacatcatggcggatagtaatatcgacaagcggtaaaggtgcctgactgagggtgataagatcgtttattgataagcaaccgagcaaattcatttcatcgtaagtgaatcccatagtttcgcagtgatgaatatttccttcccgtagcgcctgaagagcaacggttaatataatatgattcagggatggaagcatgaaattgactccttaactgaataagtgctcagtaattcagctgaatattcagtgaatggtatagtgtcatatagcacaataccgggcaggtctgaaatatacatgcaggtgcttttttttatacctgcaggatcgaagtttatgagtgccgggatattaatgttcatcatcttctcctcattgcgtctttatcggtcagataactttttgttgatccactcgtcaatctcagactcgagccaggcaacactagcagggcctatttttattgaacggggaaatgcaccctctttcatataaaggtatatctgtgaacgcttcagccctgttttttgctcaacctgtctgaggcgtagtaactgataagatgtcatatatcctcctgtgactgaaataaacggtggccggagaataaaaaaacacagtggaagcctgagagaaagctggtgagccctaaataagggatgcaaaacccttatttagggttgtcggccattacaaatggggatggtattagccggataaggatgtcgaagatggcgaaccacgcttcagcgcatttttcagtgtttcagcgtccagtttttccccgatgccatcgtctgatgcccattgttcaaaaatagaaaggagcttatagggatgattcagcagtgggctgatagtatcattgtgcttgcaggccagccaaaacaggcgtgataacggtgttgtcatacgggaaggtgaaatgggatgactctccctttttttgtataaattaattagtctttcgacttcggtgtggcgaataacaaaacaggcatcaggcggtaatgtataaagaggaaagcacccattgtgattatattttatggtcgtcacttctgttagtttttttatgacatctaatgctgtgtttttaggtagtctggaaatttgtttttctacgcgttctttccaactcatcgtttcgaaaatttgaaaaagctcctctgaaaatcttactataataccatggttagtttttcttgcccccacaattggggaggggaatttaagttcacgtgccagtatgcgctgaatcaaaacatattcatagcctatcaggggggtatctataatttgttgcacaggacaaacatatctggcttctgtacagagtcttaaattttgaccataaataaaaccgtccctgtcaagcatgcatagtttatcaagtaggtctccctcaaactgcctgaattttatttttccattaaaagtttgtatcttcttaagtatcacaggagactggaaatagaccgatagtaggatgttgccactcaaggcatgacgataaatatcgctaggagtatttttttgttttatggctttggtagtgatctcaactgcttccgttatagtgacccatgttgacatataatgagttataagcaatggctgatattttttttgacataatattatctccttctacacaacaattcgttccgttaaggaaaaagattggtgccacaagtatttatttatgattaatcagagggtttatgacagagaaaaggatgtatatttctgagtgaacatgtacaggcctatggggtgactatttaatgagtaaatgccgaatgattttcggggtgatgattataacttgaggaaaaatcccagcgtggtttgagtagtgtacctgagtgatatttgtgttatgtatgcattgattgcagaagaataaatatagttcaggctagtatagtttgtggtagctatgagaatatataatctattttacctataaaataatttatatgtatggggtggtttttttgtggcgaattggttttactgaaccctaacttttgatttttaagtttgcacttattgatatgttaatatgataaatgctttatatcagttttactctacagaatttcaaaaaaatagatgtgttaatgactgtttttgccgatgaaatctttgagttttcgaaattgttttgagttgagggtgtgtaattgtaaaggttttattaattcgggttgttttttttaggttgtttgtctgtgcttttatattctggagatgtgccttgtatataggattgtttgttggttgtgtttttaatgttgcactgttgtgaatttttattttgatatgattatttctttagtataaggagagaaaggaacgagaaagttaaatctatttgtcctaatcgcaatttcattgtttaaataatcactatggattaatattttttgcgactctgctgagttactggttttaactagtggtgtaaaagggataccttttcggtatcccttttacaataatcagaagaaatcaattcgcgtattgataccgacggtgcgacccatattgacctgcgcgacggcgctgctgccgttcatgtagccataggtacggtaacgacggtcgaacaggttatcgacatagacggaaatgttcatccgttcagtcgcctgccagcccaggctgctgtccagggtggcataggtgccttgccgcaactggttgtcgccatcgaaataatgcggcccgaccagattaaccgccagtcggggcatcagtgcgccatagcgcgtatcaatcacgccgttcacgctgcttcccgcgccataacgtggtacgaacggcacccggttaccgtgatacaactcactgtcattggtgaattcggaacggatcacgttgccattgatatcccatgaccagcctggcgcaaaccgccacttcgcttcaagctcaacgccggtggcgtcggctttacccgcattgcttaatgtctgcatcccgaccgggccagagtaaagctgcatgtctttggtgtgggtataaaacgtcgcggcttgcagcgtgacgtcagcggtttcgtagcgggtgccaagttcatagttgatggatttctcggcgacgaacggtttggcatcaagacccgcagtaggcacgatgttgtacccggaaggtttatatccctgggctacacgggtatacactctccagtcatcggtcagcatatagcctgcggatagctgcccgagcacctgatcgtcattgctcttaccctggtcgccaaacgggttgccgagcatgctgccgtgatattgtgtactggatttatcatgcgagaagcgcacgccgccgccgatatcaaaacgatcggttaaatgccaggtcaggtcactgtatgcggccagcgtttcagcggtggtatagccggtactgcttaaataaggcattgtcggcatgtcgtaggctgaatttaacttctcgcgggtgttctgccggtacagcccaaacaccatatcaacggtacgcgcatcgcccagggttgcggcgcgcagctcctgcacatcctgattccagcgctgaggcatattgacgattaacgaaccggaagggaaggtgcgcgaataatgctgctgctgccaggcgctgatcaggttgaaaacccagtcatcggtggtgtatttcccactcagggtctggctgtcagtgcagcgccgcatgtacgggtctggtgaaccatcgctgatcgacagcttacggcccttaatatcattccatcccacataggcgtcctgggtggcgcgggtacattcgcgtgaggcggcaaagcccatttcccagggctgatcgtccggcgccagacgcagtttcacattccctatgctggcgcgggtgccgcctaagtcatcgcttcccgtcgcggggttaatcatgtcgccgtcatcaacctggcgtaacagggtgacgctgccgtacagcaggccatcctgaatggggccgctcaggttgaacttacttcgataactgtcgcggctactgacgccgccttcaatatagccgcgcggcgtgctgtccggctgctgggtgacgatgttgatgatcccgccctgagcgcttttgccatataacgttccctgtgggcctcgcagcaactccacgctttgcacatcggtaagcgcctggatggtgttggtggaaagctgagggacgccatcgacatacagggtgacggcggggttatagaagtcctgcgctgaagagacgccgcgtagcgagatcgtcgaaaaaagcatgttgccgctattttcaatattgagcccgggcaagactctggggagtttgtcgctggcggtgacgccggcgtcgcttaattccggcgcgctgacaacagtagacgagacgttgttggctgatgccgagcgggaagattgtttactggcggtaaccaccagcgtgctttcgtcttgctgtgaagtctgggcattagcaatggcggggagcaataatccccccaaggccagaggataaagccgtgtcattttcattgttgtgagtccctgtaagacggcgaaacgccaaaaataccgacaatggtgaattgaaaatgataactatttctaatagtggtgctacccgaaacgggtttatttcaacctgtttcgggtcggtttgcgcttattgggcagaatggcgataacggtcgacggcgagagccgtcaggcgttttttgtctatcttgccgacggcggtgagcggccagtggtccagaaactcgatttggtcaggaattttccacgcgctgagccccatacgggtcagttgttgacgcaactgctgatagtcagttggcacctgctgcgcgatgataaacgcgcaaatccgctcgccaagcagcgtgtccggcgcggcgaccaccgcgcaatcttgcacttccgctaaacgcagcagtgccgattccacttcagccgcggctattttttctccggcgcggttgatctgctcttttatgcgtccctcaacgtgcaggttccccacctcatccagcctgacattgtcgcctgtgcggtaaaacccttgcgcggtaaaggcctgcgcgttgtgggcaggggcgcggtaatagcccgaaatggtataagggccgcgcgttaacaattgcccggtttcgcccggcgcgacgtcgttctcgtcttgatcaacgatgcggatttcatccagaggggacaacgggcgcccctggctgtggagaatggtggcatgcggatcgtccagccgggtaaaacagagcaggccttccgccataccgaaaacctgttgcagggtacagtcaaaggtggcgataacctgctcagcaagcgtcgggtcgagccgggcgccgcctgcctgaatgacgcgcagcgacgaaaggtcgctgtcttcccactccctggcctgcacccataattgcgccagcgccggaaccagggcgacgtgagtcactctttcctgcgcgattaaaggcatcacctcatcacagctggcgctgtcggtcagcaccacttttccgccgcaggcaagcgttcccagaataccggggcaggccagcggaaagttatgcgccaccgggaggacggcgagatacacgctctgttggctgatgccgcacagttcagcagaagcgctgaagttatagctatagtcggcatgtcggcgcgggatgagtttgggcgtgccggttgtgccgcctgagagcaacaacaacgcggtggcggaaacatcaggctgcggccatgcctgtcgctcaccgtgaagggagaagaacggcgtaaaatcgtcgctcacggtctctccagcgaccagaacatgacgcaagcaggcgtgtttgtgcgccatctgtcgggccagctctgcgtggttttccccgtgaataacgtaagcgacgggttgcgccagctcaatcagcgcgtcgatatccagcgcccgttgcgagggcatcgccagcacggggataacgcccagtcttaacaaggcgaacagcagggtaacaaacgcgttgtcgttgggaagctgcacaattacatgctcccccgaacgcaaacccagtgatgacagacctgcggcaagttcgtcaacttgtgcatcaagcgcgctgtaggttaacgacccctttgcatcaacgacggcaattcgcgaggcataacgggccgcccagtggcgcaactgttcggcaatgggtaagggatactgttcaatcagagatttaaaggaagaattcatgcgtcacctttctgaagtactgggctgtttttgcaacgcggtcattgcagaaaatgcgtggggaaaatggcggacaatctgcgtaaaaaaggaccgggcttgttgaatgggatagaaatgatcgccgtcaatcaccaccgggcctgtaacgtggctcagccactgacgccaggcatcgacctgctgccaggaggcttcgcgatcgtggctgccgcacaataacagcgcaggcgtgcgcagcggcggacagacgtcgggcgagtcgtagtgatagctctcggtggcgtaaaaatcagcgcgcagaagaggaagaaacagcgacattaattcctggttttcccgcagttcaggagaacatccgccaatgtctatcagctcagcgataaagtcggcatcatcgcgatggctgagctggcgttcagaatgcagatgcggggcatggcacccggaaataatcagtccttgtggcgcaagcccccgttgctccagaagtcggcaggtttcaaacgccacctgcgcccccatgctgtgcccggcgagtaaaagcggcgtgtcaggcgatacggatgcttccagctcgttcgccagcagtgccgccagttgtgtaatgcttctgagcggttccagatggcgaaggcgatcgcgccccggccaggtcaccagagaaagcgcgcaatcagccagttgctcagcttgccagtggcgaaacgcgctactgctgccgccagcgaaagggcacatgaccagatgcgcagtattgccgttccgggcgggccacagcgggatgcatattgcagattgcgtcacagcgcctccttatcatcatcgttgtagaaaccggctaaccggtcgtggtgcggcggtgtcaggcgtctgatctccgcattgccggtcttacgtaaaatctgctgccataaacgtgataacgcgatctgatgtacgctttggcaggccgctggtggatgttcgcccgccagatggctgcgcaactggtgtagcaaccagctgacgccctccggcccgacggtttcgcagcagtcgcgccagctcaggggcgccgcgctgcgcgtcagacccggcagatcgcgcaggatctccggtctgcggtagaggctgtgggcgttctcctgatggtctgcgacaaacaggctggatgaccagatgacggggccgtagctcgcctccagcgaaagatgaccttccggccagcccagcagcaggcggtgcatgataaggctatgcatatctggatcgtcaggatcgagatagcgctgaagcagcaggcaggcttctccctccggccagaagagtctcagacagtgaaaatcgctaaagctgccaaccacgtcgcactccacggcggcggcatcaacgcccagagccagcaacaacaaatccagagtggagtagagcaactgtcggctggtggtggcgtggactaccggcggcgtcttagccaggcagcgacgcagctgctgagcatcgcgaagccatgtgcgtcccgcgcgcgtatgcggataaaacgtgtttacccaatagcagcagccctgttcctgcgccagcgtttgtaaggaactgatgtcatccgggtggaggggatgctcctgaatgacgtgtacgccgcgcgtcagaaagtgtctggcaagctgcgtaccggttcctccggcgacggtcgaacgcacgacaatacaggcgatatccggcatcccggttatctgttccggcgaggtatacagcggaatgccaaacgcatgagccagctctcttgaacgggcgcttccctgcgccagcaggccgaccagttccagcccctccgggggctgcataaaggcattcaggtacatttcgccaaatttggcgcccacaatcagtacgcgttgttttggggaggcggacggcatcataacgtgttctccggttgcattgaggttgcgcaaagccagcgcgtaatgtgttgcgcacaagcctgaacgtggggggcttccatcatgatttgccagtggctggcttcaatcacagcgtcgtcggcgttgtttatccagccctgccactcggtttctgctggcgtccagcgcgcgggtctcccggcggcatacaccatgagacaggggaccggaacgctttcgcccggcgtatgctcagtcagtaaacgcagcagatgcgcgatgttgtcgagccacgtttctgccgcttgcagcgtcaggttttgcgacaccataccggccgttttagcgaggctgataaagtcggcaagctggctgtcgggcgtctgctggtcgaaatgttcgggcagtgccagaggcgtttgtccttcggctaacaggcgcagcagggccgcccggttttcgcaacagaaatcctgtcggcacacgggatcgattaacaccatccgaacctgctcgcctttggcgtacaggcgctgtgcggcgcccgccgcaagaaacgcgccatacgaccaacccgccagcacataagggccgtgaggctgctgacgacggatgcacccgacatactcatcgatcatctggtcgagcgtggcaaagcgctgcggcgattttgcttgcaggccgaaaacgcgcctgttcaacgcgctggcgagcggcagccaggcgctgatatcgccgtctgaagcgtggaagacaaacagggtttcctcaccgtcgccctggcaaaggggtatcgggttgtcctctcctgacgtagccgcctgtagatgggcgcagaagtcgctcagcgtcgaatggctgaacagatcctgaaggttagccctggcaatccctctccggtttagctgcgcgaccatccttgtcgccatcaggctgtcgccgcccagttcgaaaaagtcgtgatgccttgccacggggcgagacagcagcgattgccagagttcagccacctgtttttccagcgccggattccccccggcaactggcgtaggtttggctggctcagtcggcgcatcagacggggcatgcagcggcgtaaataacgcttctctttgccggatctgtaaaatgggcagaccggtgccaaagcgctgctgtaaatagtggctcacggcttttttatccgggcgatttacgccaggcgaacgcgccaccagcagatgctggcgcagcggcgacgattcctgcgcgggccacgccagctcgtttgcaaacccggcctgaacgagaacctcctgccatgcggagcgggtgagcatcggtttctcatcccggcggcggaaatcgcggtatccgcttaatccctcaataaagcccacgctcgccagctggaatacgctgtttcgctccgtcgcttcaacgatcagcaaacgtccgccggctttcagcaacagttttaatctgcgcaacgtctggacgacatggctggcgtcgtggagcacattgacggcaacgatcaggtcgtaacccgcctccgggtgggcggtgaaatccagcggctggttgatgtcgaacaaggcataagacacctgcgattcatcatggaaacgggctctggcgtcattgaggaactgcgcggagacgtccgtgaagtggtacgactgccgcgtgttccgcgtggccttcagcaccggcgcggtagtggctgcggttccggcgccaacctccagaatccgttctgcgctgcacaaggcggcaatctgcgcggtatagcgattcagacaggcgctggcggggttgtcgcgatacagcgcgtcggtaacgcgatgctgctcgttgaacagcaattccagcggagaacactgcccggagaagagggcgtcgtgccgggcgatgcaggtttccagatactgcgccagcgcctggctccattggcttggcgggcacgcttcctgaggctcaggaatctcgctgagcggaacgcggcagcgccagctttcaccttcgcggattaaccacgctctttccgtcagacactgtagccactggcgcagcagacgctggtgagacgcttgcgcggacagcgcctgtactattgcgctaaagcgatgggcgatctccggcgtggtaaacaggccgtgacgatttagcgtggccgcgatcccctgtagcgcacgcgcctccagccagcgccaggtcgcctccagctcatcaagctgcgcctgctcaggcaacggcagcgccagttgggtaagttcgtgctcatcaggcgtcgccgctgatggcgacggatcgtcggccatcacgatatccagcgtcaacgcgccttgttcggtcatttccgctctggtctgccggatgccggggtattcgagcgtcgcctgctcaatatcccgcaggtcgtagtccgtctgtgcgttcagcggccagcgtcggcggggaatgtgcccggcgatgccgctggcgagagtcttcaggctttcaggggcggcgatgacggcttgcaggatggcgcaatagtcattaaacatcgcctcggcagcgccgggttccagcacgttgtccatgcagtaccagctaaacatcaactcgccgtcgctctccatgacctgatgatccagccagacctgcggcgtttgcgtgaacacatagcagggttcgccgaacagatggctcatcgcctgatcgatagtcatgccttccagcgtcatccccagcatactggtaaacaccaccggcattagcggttgacgttgtgacccgcgcaggcggcccagctcacggatcacctcaacaccgttcatttcactgtgcgccatgttttgccagaggcgctgttgggtctgttgcatctgctcttgcaacgtcaccggcgttgagaagttaaaatcaaccagcgtgacggaggtaaaatcaccaatcaactggttgatttgcggatggatcggctggcgattgaagaacgtcaggttcagcgtaaatgccgtggtgcggctccagcgctcaagggtggcggcaaacagcgtgagcagtgcggcagacggtgtgacgccttgctgctgccagcgctgtttcacggcctgccattctgtcttgccgatcgtcgatttgaaggtggtgaagtgtggcgtttccgggggtgtctcaaccaccggcagctctggcgctaagggcagttgcggcagtttttcctgccagtaatcccaggcatcgtgccatgccgatgtctgtcggcgcgcctgttcagccatcacataatcacggaaggtaatagcgagcggcgccagcgtttcaccgcgccagacctgcgccagatcgtccatcatgactttaaaactctgcacatcgaactgcaaaaggtcgaggttcatgtgcaggcggtaatggcaatcgtcgatttcgctgaccaccagctcaaaaagaggccactggtcggcaggcaaaacgcgatagctcagttcatgccgccgtttttccagcgctatacgctgttcttccggggaaagcgcgcgcagatcgtcacgctggatgtgatactccggcgttgtcgccaggactcgctgctgcccgtcggcatcaaccaccatgcgcaacatatcgtggcgtgcgataagctggttccatgctttctccagtatggcgagatcgaactcatcgtggcgtttatcccactcaaacaggacgtgacaggcgacgccgccatagccaatgaggtgggttcgccccagccagtaggcgtgctgaatgggcgtcaaagggaagggcgcataacgctcgtcggcgtcgtgccgcaacacttccggctgcgaagcggcaggcgtcgtctctggcttagaacagataagctgcgtgagtccatgaggagacagatcctgccacgcccgttccgcattgatgcgtacacccaggtagtgctgaatatcgctactgagttcaaggaagagcagcgagtccatgccgagttgcaacagatcctggtttggacgcagtgacgccggatcgctcagccttagctgaaccgcaatccgctttttcagccatgccatcaccgccgtttcatcgctcaggctgccgttaaaggcgttgtcatcagcaggaggaatgaccggcgttgcggctttttctgtggcgctgatgttaaacagagcctgttgtaacgggggcattttgtcggtaaaaacgcgcatcgccagtcgccacggggcgccgcgcatcaccgcctgttccaggtgccagcagccttcggcatcgcttaacgcgcccatacctcggctggcgagcgtcaccagcatttccggcgtggccgcccgaccgctttctccccatgcgccccaggcgacagagagcgttttcggcgcatcaagggtggaaaactgctgggccagcccgtccaggtagccgcaggccagcgcatgggcgctctgacccggcgcgccgagggtggcggcagcggaagagtagagaataagatagcgtccgtcgtggttgcgcagggtttgcaacagctggtttgccgcctgcgcttttaccgcgaaaacggcagccagctggtggtcgtcaagttcctgcaacggcgcgtcagccaatacgccagcggcatgaatcgctccggcaatgccgccgttggccgccagatcgtcaagaaccgtggccagttgcccggcatcgcccacatcacaacggcagacgcgcgtctgcccgccctccacgtcgcgtagccatgactcatccacgcgcggcgccagcagggcgatgcgtcgcgcccctttttctctgagccagttcacggcaaggcggcctaatccgccaaacgcaccggtcaccagatgccagcggttatcgccgataaacacgtttgccggtaattcagcggcgcatcccgtattgggcgccagtgaagggagccagagggtgtcaccccgtgcggcgagccagcgctgtgatagtgagactgcgctcaacccttgatgcagcgtttcccacggggtgttttcggcgagatcgatggcggcaatcaaccgttccggctgttcgttggccgcgacgcgaagcaaggcccatagcgcgtgatgggacgcagagagtgcctcattttcctcgactcgccacgcgcggcgggtgaccacaatcaatccggctgcgctggcggtgagcgccgctatcactttctccgctaaggccagcgtatcctcgctctcctcaacaatcatcagtcgcgaagaggcgtgcggatcgtgaatgatgccgtattgcgccagctcgtcgctgcgcgcaagcgtaccggtgctaaagctgaaggtaagcggatggtcaacgctggcgacgttgaggggcgtccagcgccattgataatgcgtctgcggcgcaggaagaggcgcggtgggcgatagcggcagccactcgccatcaggatgacgggcttcaacgcgcatctgaccgcgggaaaaggcttcgttttgccagcttaagcgaacctcctccagccactccggggcggcgacggggggcggttccacaggcagagcgtcgccatgacgctgtgagagcagacgccaggcctcctgccagcgggcgttaaaccgttcaggctgacctgcgcaatcagaccagtcggcgagataatcaccgttatccgtcagcgcctgccccaacacgggttctgatggcgcggtgaatgttacggcgctaaccgcctgaccgggcagcgtggcgagaatgatatgttcgctcatcccggcggttgggctgccatcctgcggtagccacgccactttgctgaatccggcgtggcggcactgttgctgccactgagcggtggtgaggaataactcaccttcgcgggcgtcgagatcctgtagcggaagaaccagcgggccgaaaacgaagtcaaacagacgcattggctgggtgatttcgcgcatcagcaggcgcccgcccggcttgagcagggggcgcagattatcgagcgtgcgaccaatatggcgggtggcgtgaatcacgttcgccgccacgataagatcgtaagactgtgcctggaagccctgagactgcgcctctttttcgagatccagctcgctatacttcacaaaatcatagtcggcgaatttctgctgggcgcggcgggtgaacagcgccgagatatcggtgaaatggtactccagtgccggaacgccgttaagttccggcagcagccacgcggtggtgccgccggttccgccgccaacttcaagaatacgcaacggctggcggggctgacgcgtctggacaatgccgcgtaataccccggcggcgatttggttgaaatagcggccaaagctgaattcctgatacagcacttccacgccgtcggaggcgctttgcgggaagataatcgccaccggttcttccgcgccgctcatcatttcatataaccgatcgccggcacgggcgatggtgtcgggaatagcctgaaaaccttcacaataaccggcaagttccgtcagcagtgattcccgctgttgatgttcaatggggcgggcgcggacgtatcgcccgtcggtgcagcggtaatcgccgtcgaccacgcagttattcagcaggcgctggagtagctgctggtagcggggcagcagacgtccacggcgtatgatggtcatggcgtccacgccgtcctcaatggcatcgccggtacagcgttgtaccagttgatcgacgtagatggcgtgcagtcgcgtggcgcactgtttaagcgcttccagacgggggagatcgagcgctgtcgcggcgcgactcgccacctccagcccggcagacagcgttgcgtcggcaggctcgcaggccggggagacgcgctctttccagtaacgctcagtatcaaacggataacatggcgcagcgatacgttgtccatcgcccgccagcaggtcggcccacggtagggcgacgccggcagcgtaaagctggagcagggcctgattgaggacatcgctcgcctctttgttacgccgggcgctggctatccagtatgcgttatcgcggtattcgcgctgcccggaaacaaccaactgggcatcgggccccatctccagaaaaacgcgggcgccgagctgatgcgccatctgaatactctggataaaacgcaccggctggcgcatgtgtcggcgccagtaatccacctggttgagcgttgactcatcaatgacgtcggcggtgagcgtggaaataatcggtatttgccccggctccgcgtgcagccccgcgcaggcgtcctggaaccgatcgagtatcggctccagtaaagcggagtgcgccgcgccggttacgctcaggcgacgatagttaatatcatgctgcgagagcgtggcgcaaaataccgcgagacgggcttccggcccggaaaataccgtatgttgcgtaccgttgttggcggcgagatccagctcaaactggcgagccagcggcatcagcgtgtcttcgtctgcaaataccgccaccatcgcgccgcttgcgcactgctgcattagcgcgccgcgccgacaaaccagtggcatgacctgttcaatcgtatagtgtccgcagacaacggcagcggcaaattcaccgacggaatgcccaatggcgaagtctggcttcagtccttcagcgcgccagtgcgccgccatcgcgatttcaaacgcgacaatcgctggctgcgcccaggccatattgtccagctgtgccgaatcggggttaaacatcgcttcgcgcagtgacggcgtgagcatttcgctacaggcggaaaaacagcgatccagcgtgtcggcaaacgccgttgagtgctggtacatcgtctgacccatagtgcgccagtgtgagccctggccggtaaacagccacacctgcttgccgctggcgccgtggccgctataaaccagcgcccccgatttctcaccggcccaggcgctgagcgccgcagcggtttcacggtttaatggcgccgccaggcggaagggaagatcgaggcggcgcgcgtgcagggccgtgaaggccagattgctggcatccgtattctctctcagcgccccggcataatccgtcgccagccgccgcaacgcgctgtcgctggcggcgctgagcagcagcgcggtactttttctgccgccatccgtattggggaggcgcacgttgagcgtgtcgggtagcgaggcgacgatcatatggcagttggtgccgccaataccaaaggaggagacgcccgcatagcgcatttcgtcctgccatgcctgtgccgacaccggtatggtaaaggggctctcttcaagcttcagcgccgggttgggggtgtgaaaattcagtaagggaggaatttgcccgcggctgactgccagaatggttttcagcagtccggcaatgcccgccgcggtatccagatggcccatgttacttttcacggaaccgagcgcacagcgctgatcctgcgggcgaggcgcatagacgttgcgtaacgcttcaatttcaatcgcgtcgcccagcggtgtgccggtgccgtgggtttcaatgtaacctacctgcctgtcgtcgatggccgccagcattaacgcctcttcgatgaccgcctgctgccctgcgacggaaggggcggtatagccgacctttctgttgccgtcgttgttgaccgcgctggagaggatcaccgagataatcggatcgcctgacagcagcgcgtctctcaggcgacgcagcaccacgcagccgagaccgttaccggcccaggtgccctcagccgaggcgtcaaagggacgacagtgaccatcaggagagaaaatcattccgggctggtagcggtagcctgcctgctgggggaaagagagcgccacgccgccggcaaccgccatatcggattcgcctgcgcgcaggctttcacaggccagatgcacggcaaccagcgagctggagcaggcggtctgtaccgataacgccgggccgtgcaggttgagtttgtacgcggcgcgggtggcaatatagtctttatcattgcccatcagtgattgcagaccctttacctgcgcgacttctgtcacgttcaatgcttcgcgaccggggtaggtactcatccgggaagaggcgaaaacgccggtcttatgggggacggcgccgggggcataaccggcatgttccagcgcatgccagaccgcctgcaaaaacaggcgctgctgcgggtccatcgactccgcttcctgtcgcgaatagccaaacagggtggcgtcgaagcagtcggcgttgtctaacaccgtaccgatattgacataatgaggatcgtcaatgatggcggcatccagacccacggccagaagctcttcgcgcgtaaagcgtcggctgcattcacgaccttccagcagattttgccagaacgtttcgccatccggcgattcaggaaaatggcaggcgtagccgataaccgcgacaggttcgcagtccgggtagtgttgagcgatcgatgcatcaatggaatctgctgtcggcgcagaagagaagcgcaagttatccataatcggtcccgtttcctaagattcacaaagtcaatggaacgccatgcgttcgcgatggcgttccggggaaaatcagtttgcttcgcgctatatccgccgctgacgacggcgaacagggcgaggacgttttgttctctccaccgtggcgacgccggccagataatcggccagggcggcaggagaagggtgggtgaagaggtcaagcaacgtcagggtggaaaattcgtgacgttgtaacaaaacgtgcagttgcaccagattcagcgacgttgcgcccgcctcaaagaagttttctgcgggcgtgacagactcgccaaccacctcgcggaaggcgtcgcaaatcaggctgacggtgctctcgtccgccgcaatgtgtggctgagagtgctcagggcatacgcgcggtgagcgctctgcgcattgccctgcgtgtttaacgggaggcaccagcgcggcgagcggcagttgccagccgctttcatcctcggccattcggtttagcaatgcgcaatactgttcaaactggcgctccacctgcccggcaggaaacagcgcggcgacaaaatcccagttaaagcgcagttcgccttcggattcataaacctggtgatcgagccagacctgcggcgtctgggagatgccccagaccggtttgagcagattacgccgggcgaggaagttatcctgctcaaagcccagcgcgctggtaaagacgacgggcatcggaacggcaggcacgttttgccgttgcgccagttgacgcatcacgcggatagctgacacatcgcggtggttgaggttctggctcagccgctgctgtagtgactgtgcgctgtgcagccagctttcgccgggatgccagctcagcagcatcagcgaggtgaaatcgcccagaatctggttgatttgcgggtgcagtggtcgcctgtcgaaaagcgtaaggttaagcgtgaactcaggctgcgcactccatgcagagagaaccgttgaccacaccgacaacagcacggccgacggggtgagatgggcgtcagccgcccgttttttcagccgatgccagcgcgtgctgtccagcgcgccgttcaggcgggcgaagcgaggtgtttcaacctcctgaggcaagcagcgcaacggcaacgcaggcgccggaggaatatcatcaagctgcgcctgccaccatgccagagaatctggattgggcgactgtagcgagggttgttgcagataatccctgaaggtgacgggcagcggcggaagcagctgttgcgggtagcggtagccgtgctccagctccgccagcaggatctgcatgctcagaccgtcaagcaacaggttatccagacacagccacaggcgggcgggcatcccgtccacgtatccgacctggagatcgaataccggccacacttcggggttgagtacctgatgcgccagtttttcgcgtacccgcaacgcctcttcaggcgtatggagggtgtgtgcgggtatcacccaggggggcgtctgttcgagcacctgttgctgtccatcacgcacgatggcgcgcagcatatcgtggcgggcgattaatcggttccagaccgtctccagccgggtgagatccagatcggcaatttcaaattcaacaaagaaatgtgagccgacgccgcccagggcaaagcccggctgacgccccaccaggtaagcctgctgcacgtcggtaagcgcaaagggctggtagcgatattcaggggagtggacgaatggttgttcgaccgggacgtcggttttccgcagcgtggcggcaaaatccgccagccggggatgattaaacaggtcgcttaattgcgcttcataacctgcctgatgaagttgcccggtcagacgggtcgccagcaggctatcgccgccttgctggaagaagtcggtttctctggtgacattgccagtcgataagagttgctgccagagggcggcaacctgtttttcaatgtcgccctggggtaaatccgcttcggccgggttttccgcttcaggggtatgacgacgcttcagcgcctgatagtcaatcttcccgttagccgtcaacggtaaggcgtcgaggaagacgatccgttgcggcaccatccaccccggcaggcgcccggcgagggcggcctgaagttgacggggatcgcggcgcatctgcctgtcagggcattgtacgaggaagcgttgtaaccccgcgatctcatcgccatgctgacagttgaaggcggctgcgctaaataatgccgcccagtcggcgctgttatgcagcaaggcctccggctgcccatcggttaacagaagcgtgctgagcaaggcggacggcgttaactggcgaaactccatcacgtagagcagcgcgccgggaacggcaagctgttgtaatgttgcaaggagcccgggatcttccggcagcagacgatgcagggcgttattaagccagataatgtccgccgagtgagcgtgcgccgccagcgtgtctgcattccagggagacagacgagcgccaggccagggggcgagcctctgccgggcgctcagcagcatctcctggctctgctcaagcccgatatactcaatctgtccggcgttgagctgtgccaacagcgattctgcggcgcggccggtgcgggttcccacctcaagcaggcgtaccgggcgctgtaagcgctgtgcaagctgttggcaaattgtcgccagttcctgaatatacggggcgctggccggatggttgaaggccaggctttccggcgaccactgcgcgtcgttcagtaacgacagttcgtcacgggcgccgcgaagaatttgcgataacgttaaatcatgtccgctgaagtgcgggtgctcatcctcgcgttcttcaccagcgcagacctgataaccttcagcagcgggcttcagtcgccgttgcgtcaccagaaatgctaaccagcgttccaccacggcctgccagcgcggctggatagcgagtgagttcatcagggggagaggatcggcgccagcggtgtgacccggctttagttttaacaggcgatgctgaaggaaatcggctacctgttctgcggagatctctggcgagatggagcaacagggcaacgttcccgcaagcgtgtgccacgcctgcggcagtgccgggttccggtgatcggtaacgcaaaaagcctcgccctgaggaacaacgtatgccgccagcgttttttctttttcgccgatcgccagaacggttgcttgtttcacccccgccagctggctgagcgcgctttcgatttcgcccagctcgatgcgatatcctccgactttgacctgcttgtcgcgacgaccgaggaactcgattgtgccgtctggccagtagcagccgagatcgccggtgcgataccagcgctcgtccgggagcgtcaaaaattgctgctcgctgcgcagggggtcgttgaaatagccttccgcgaccccgataccgccaatccataattcgcccggcacccagtcagggcagtcccggccccgttcatccaccacccggtagcgttggttggctagcggaaaaccgtaagggatggagcgccagtgggcagggacgtcgtgaatttcgcaggcgttagaccagatagacgcctcggtggcgccgcccatcgcgataaattgtccttgtggccggaaggcccgataacgggcggggaggtcaagcccgatccagtcgccggaaagcatcactgcgcgcaggttttccggcgtggcgtcggcgaagccttcacaccaggtcagcagcatatcgaacagcgccgggacgctgttccagagcgtgacctgatggcgctggatcagctcacaccatgcgtgaggatcgcgccgttgattttccatcaccatcaccagcgcgccgcccgcgcgcagtacgccaaaaatgtcgtaaaccgataaatcaaaatgcagggcggagagggccagcaccctgtcatgcgggccaacctgatagcgggtattgatatcgcaacaggtgttgagcgctccccggtgagaaatgactacccctttcggcgtgccggtagagccggaggtgtagataatgtaggccggttgcgtgggggcgcgtaccaccgggttgacgatcggctccgcctcaatggcctgctgccaggcaaggacgggaatatcgtctgaccaggcgctggcgtcgtgctggcaaatgagcaccagccggacgctggcgtcagcgtagattttctcgcgccgtgcggcaggctggtccagcgaaaccggaacgtaaaccgccccggccagcaggacggccagaaccgcaacaagttgtcctgcgcctttcgacatcgtgatagccacattatcgccgggctgaaccccgcactcgattaacctgcccgcgcaacggcgggcatagtctgtcagctcatgataattccactgataacgcatgtccgttaccgccagcgcctgcggctgttgcagagcgatacggaaaatgccttcatgcagcaagccttcgggaatgggggcgccggtggcgttgacccgttcgcgtatcgcgcgctggctggcgggcatcatatctgcgaacggcttttgccaggcgctttcgtcatcgcagagttggttaatcaactggcagtaggcgtcgaacaatgtttcgactaacgccggagggaacagcgcgtcgttgctgtcccattgcagccagacctcgccgtgatgctcgaacgccagatgatctatccagacctgcggcgtttgcgagatgccccattccggctcgcccaacggcgattctgcgcggctgctgtagagggaacgccccagattgctggtaaataccaccggggcgccgtgggggtagcgctgctggcgtttgagttcacggagtagctcgacgccggaccagtggcgatgctcccagtcctccgtaaacgtgagctggtttttacgcgccagattgctgacggtatcgccgtcgcaggcggtatccagcagaagaatattggtgaagtcggcaagcatcgcgccaaccgccgggtgcagcggctggcggtcgaataaggtgatgttaagcagcagacgcgtcaggccgccccagcgagccagcacggcagaaaaacaggtcgccagcgccattgtcggcgtcacgccatactcgccggcccggttgctaaaggcgtgccagcgtgttgccgggacaatcatgcggcgtcgggtattacggacttcacgtagcgtggcgggttcgcaggccagcggcaagacgggcgcggggggaagcgtcgatgctttcgccagccagtaagcgcgcgcgtcgtctctcagtggttgattgatcttctgctgttgcagcaaatacgagcggaaatcatagcgggtgtcgatagccggcagcgattctccggccagcagggcgttaagctcatcgaagaaaagcgtaaagctggaggcatccataatcagcaggtcaatattgacatggaggcggtggcgattgtccggcaagagcgtcagctgaaaatcaaacgtttcgccgatctccacgcgtaaaagacggtggctcaggcgctggcgtagcgcgtccagataggcctggcggctttcagcgtcgttatggcgtaaatcatgaacggtgacgccgttccagtaaggttgcggtagccagacctgctgcccgtcggggcgaaaggcgatatgcagcattgggtggcgttgcagcaaggtcgtgatggcctgctccagctgcgacgccgtcagacaatggccttcaaactcctgatacaggtggcaacccacgccgccaagcgtctgccccggcatgcggcccgtcaggtaggcgtgctgtaccggcgtcaatgggaagggggtactttcggtcatgttcggccaggatgattcgtcgggcggcgtttcttcttccgcgttctccggcgaccggctgagcattaactggttccatgccgccagcgtgggggcggcatacagctcgcgaagggtaaggcggtagccatttttacgaaaccagtgtaaccatctcatcaatcttattgaatccaggccagcctggatcagattgctctcttcatgtaactgctgcggcgttaaattcagttcctgtataagccgctcgcgtaattgttggtaatcagccgcgtggcggttgtccggtaacagcgaatcctgagatggtgcgccagaaatcattcttcctcctgatggcacgtcttaccgaaaagcattgcttatatgagaataataattattaacaattggatgctacccgaaacgggtttatttatgcccgtttcgggttggtaacaggcggaaagaacagaggcccggatggggtatccgggcctctgtcagggaggaatttaggggggcgcgaccccggttacatcacgcgtttaaaggtcgaaggggttacgccaaactgtttctggaaggcggcagaaaaatggctggcgttggcatagcccagatcggccgccaccgtcatgacggaggtattgccgttggccaggcgtcttctggcttcctgcattcgttcagcctgaaacaggccatagacgctgttgttgaacagaacgcggaagcctcgcttaattttgagaacgctcagaccggactctctggccagctccgcaacgcccggcgcttgcgtcagatcagccagcagcagatccttcgcccgcagcagtttctgacgttccatcgggttgaagtggcaggagaggcaactggcgtcttcgcgatgttcatccagtaccagactgagcatgaccagactttgcccctgcaaccatagcgtcgacggcttttgttcatgactgaagccgccgtgcatgcgcatcagcgcgtgacgcaaggcctgagccgttaagtgggtttcagcattacaacgctgctgctggcaacagcagtgggagtcgatcttattcttaatgaccgcgctaatatccggcacccacagcgcaagggtttcagggctgaaggagagggtaatgctctcgaatcggccacaataggaggcgctgccacggcagtctggcgtatgggtaatgtaatggcgattgcgcgcaagctcccagtcggtgtggcgccggagtccctgaatcgcaaagcgcgatgtgccttccaggatgcacgagaagttaatcctgcccagatcgtcgtgtagctgcaacgtctcaggccgcgcaaaatggcccctccagagcaaaatatccataccttcctgcaacgaacagcgcagcagttcacactgagcaggaatattgccatcgtttgcaggtttcccgaccaccaactggtgaatagagatttcagattgcgtttgcggtgactccgtcatgacctggttatctccctgtggcttagaccaatgcgggcatatacccgtcatatttcaagttgcatgtgcgttggctacgctcactcaccccagtcacttacttctgtaagctcctggggcttccctcgcttgccgccttcctgcaactcgaactatttagggtataaatagaaccgaatggggtagatgagttattgataatggttattattcacattaattctcagaacgccaccctgaattgtcgtttttggcgtccgtaaaaattcatcaggaaattcagttactcccatgtcatctcaatcatccaatactgaatcgctgtcccgatttcctctctggcaggtgattacaccggttcgcaggaaggttattttagctatggcgctggcggggctggcggcattaaccagcctgggggcgctcctttttctggcgtggagcctgcgtgacattcgcgcgacgcctgacgctattccggcctggccgctgggcggcgtgatcggctgcgtggtcttaacttttgttctgcgcttgcaggcgttcaacacctctcattacgcggcttttcatctggagaacattctgcgcagcaggttagcccgtaaagcattgcagcttccgcctggcgtgttacagcaaatgggcagcgggtcagtggcgaaagtgatgctggatgacgtgaagtcgttacatatttttgtggccgacagcacgccgctctatgcccgcgcgatcatcatgccgctggcgacaatcgttatcttgttctggctggactggcggctggcaatcgcgacgctgggggtactggcgtttggatcggttgttctcgtgctcgcccgccagcgttcggaagatatggctcagcgttatcataaggcgcgcgagcaggtcagcgcggcggttattgagttcgtgcaggccatgcccgtggtgagaacgtttgatagcggcagcaccagttttttgcgctatcaacgcgcccttgaagagtgggtcgatgtgctcaaaacctggtatcgcaaagccggtttttcagcgcgtttttccttctcgattctgaatcctctcccgaccctgtttgtcctgatctggtcgggatacggcctgttgcactatggcagtctcgattttattgcgtgggtggccgttttactgctgggcagcggaatggccgaagccgtaatgccaatgatgatgctcaataacctggtcgcgcaaacgcgtttaagcattcagcgtatttatcaggttctcgcgatgccggagttatcgctgccgctgtccgaccagcagccgcaagaggcgagcattacctttgagcaggtgagctttcattatccgcaagcgcgtactggcgccgcgttgcaggaggtgagctttcatgtgcctgccgggcaaattgtggcgctggtcgggccaagcggcgccggaaaaagcactgtagcgcgcttgctgctgcgttacgccgacccggacaaaggccatatccgtattggcggcgtggatctgcgcgatatgcagacggacaccctgatgaagcaactctcatttgtgtttcaggacaacttcctttttgccgacacgatagccaataacattcgtctgggcgcgccggatacgccgctggaggcggtaatagcggcggccagagtggcgcaggcccatgattttattagcgcgctgccagaaggttacaacacgcgagtcggggaacgcggggtatttctctccggcggccagcggcagcgcatcactattgcccgggcgcttttgcaggatcgccccatcctggtgctcgatgaggcgacggcgtttgctgacccggaaaacgaagcggcgcttatcaaggcgctcgcggcggccatgcgcggccggacggtcatcatggtcgcgcatcgtctttcaatggtgactcaggccgatgtgatattgctgttttccgacggacagctcagggaaatggggaaccatacgcaactgttggcgcagggcggcctgtatcaacggctctggcaacactatcagcaggcgcagcattgggtgccgggtggaacacaggaagaggtggtggaaaatgaaagacaataatcctgcggataacctggcctggcgcgtcatctggcgccagcttatctccagcgttggcagtcaggccaggatgctgcggcgcagtatgctggcgctgttgctggcggcattcatgcaggggatcgcctttgcttgtctttatccgatcattgatgcgctgttacggggagacgcgccgcaacttctcaactgggctgtggccttcagcgtcgccgcgattgtgacgctggcgctacgctggtatggcctgggctttgaataccgtggtcatctggcgcaggccacccatgagttgcgcctgcgacttggcgagcagttacgccgcgtgccgctggagaagctccagcgtggcagggcgggcgaaatgaacgccttgctgctgggcagcgtggatgaaaacctcaattatgttatcgcgatagccaatattttgctgctcaccattgtcacgccgctgacggcgtcgctggcgacattgtggatagactggcggctggggctggtgatgttgctgatcttccctctgctggtgccgttttattactggcgccgcccggcgatgcggcgacaaatgcagacgctgggggaagcgcaccagcggctgagcggcgatatcgttgaatttgctcaggggatgatggtattgcgcacctgcggcagcgatgccgataaaagccgggcgctgctggcgcatttcaatgcgctggaaaacttacagacccgcactcaccgccagggcgctggcgcgacgatgctgatcgccagcgtcgtggagttgggcctacaggtggtggtgttatccgggatcgtctgggtggtgacgggcactctgaacctcgcctttctgattgccgccgtcgcgatgattatgcgcttcgcagaaccgatggcgatgtttatcagctacacctcggttgtggaactgatcgccagcgccctgcaacggattgagcagtttatggcggtagcaccgcttcccgtcgcagagcaaagcgagatgccggaacgttatgatatccgctttgacaacgtcagctatcgctacgaagaaggcgacggccacgcgcttaatcatgtttctttgacgttcccggcggccagtatgagcgcgctggtgggtgcctccggcgcaggcaaaaccacggtcactaaactgttaatgcgctatgccgatccgcagcaagggcagatttctattggcggcgtcgatattcgccgcctgacgccggaacagctcaatagcctgatttctgttgttttccaggatgtctggctgtttgatgacacgctgctggcgaatatccgtatcgcgcgcccacaggcgacgcgacaggaggtggaagaggcagcccgcgcggcgcagtgccttgagtttatttcccgtcttccgcaaggctggctgacgccaatgggggagatgggcggccagctatcgggcggcgagcgccagcggatttccattgccagagcgttattgaaaaacgcgccggtcgtcattctcgatgaaccgaccgccgcgctggatattgaaagcgagctggcggtgcaaaaagcgatcgataacctggtccacaaccggacggtgattatcatcgcccaccgtttatccaccatcgccggggccggaaacatcctggtgatggaagagggacaggtggttgagcagggtactcatgcgcaattgctctctcatcatggacgttatcaggcgctgtggcaggcgcaaatggccgcgcgcgtgtggcgagacgacggggtttccgcgtctggagagtgggtgcatgagtgatgttcagtcgaatgtgaaaccgctgacgttgacgaccgggcgggtgatttttgctattgccggcgtctatgtgacgcagagcctggtatcggcgctgtctatgcagtccttacccgcgctggtgcgcgctgctggcggttcgctggcgcttgccggtgcgacaaccctgtttatgctgccctgggcgctgaagtttatttgggcgccgtggatcgaacgctggcggcttccgcccggtagccaggaacgccgttcccgcatgttaatcctgcgtggtcaggtcgcgctagcggcgatcctgatgattgccgcagcgattggctggtttgggcgagaagggggatttcctgatacgcaaatcgtcgcgttatttgttctgtttatggtggcaggcacggtcgcctccaccattgatatcgccagcgacggcttttgcgtcgatcaactgacccgcgcgggttacggctggggaaacagcgtgcaggttggcggtagctatctgggaatgatgtgcggcggcggggtgttcctgatgctgtcggcagcatccggctggcctgtcgccatgctgatgatggcgatgctgattatggcgctgtcattcccgctgtggcgcattacggagccgacgcgaacagcgactatcccgcatgttccggcgttaggttatgcgctaaggaggaaacaggcgcgcctgggcttactgctggtattgatgctgaattcaggcatgcggtttgtgctgcctcttctggcgccgctgttgttggatcatgggttaagcatgtccgcgttgggcgcgctgttcagcggcggcaatattgcagcgggcatagcaggaacgctggccggcggattgctgatgaaatacacctcacccggcagagcgctgttgacggcttatggcgtccaggggatcgcgctgctggcggtggtgatgacgctcatgatggcgccgggtcatctgctgctgccgattctccagtgtctggtcattgtccagtccatttcgctggcctgcgcgctggtctgtctttacgccacgctgatgtcgctttcatcgcctttgcaggccggtgtcgacttcaccctctttcaatgtactgacgcggcaatcgccattctggcaggcgttatcggcggcgttgttgctcaacattttggctatgcggcctgcttcctgtttgccggggcattcacgttgctggcggcgtgggttgcttatatccggctgcattcggcaagagaactgatgacaagcgcaattgattgatccgggaataacacagagaggtaagggatgaaaatcagtgaatttttacacctggcgttaccagaggaacaatggctgccgacgatttctggcgttttacgccagttcgcagaagaagagtgttatgtctatgagcgtcaaccctgttggtatttaggcaaagggtgccaggcacggttgcacattaatgccgatggaacgcaggcgacatttattgatgatgccggggagcaaaaatgggcggtggattccattgccgactgcgcgcgtcgttttatggcgcatcctcaggtgaaaggacgtcgggtatatggacaggtcgggttcaactttgcggcgcatgcgcggaggattacctttgacgccggggagtggccgctgctgacgttaaccgttccccgtgaagaacttatttttgaaaagggaaatgtcaccgtttatgcggactccgccgacgggtgccgacgtctgtgcgagtgggtaaaagaggccggtacaacgacgcagaacgcaccactggcggtggataccgccctcaatggtgaggcgtataaacaacaggttgtacgcgccgttgcggagatccgccgtggcgagtatgtcaaagtgattgtctcgcgcgccattcccctgccatcgcggattgatatgcctgccacgctgttatacggtcggcaggcaaacacgcctgtgcgctcgtttatgttccgtcaggaaggacgcgaagcgctgggctttagcccggaactggtgatgtcagtgacgggcaataaagtggtcactgaaccgcttgcgggcacccgcgatcgcatgggaaacccggagcataataaggcgaaagaggcagaactgctgcacgacagtaaagaggtgcttgagcatatcctttctgtcaaagaagctattgctgaactggaggccgtttgccagccgggcagcgtggtggttgaagatttaatgtcggttcgccagcgcggcagcgttcagcatctggggtctggcgtgagcggtcagcttgcggaaaacaaggatgcctgggatgcgtttactgtattgtttccgtcgattaccgcctcaggcatccctaaaaacgctgctctgaacgcgattatgcaaattgagaatacgccgcgagagctttattccggcgcaattctgctgctggacgatacgcgcttcgatgcggcgctggtcctgcgttccgtatttcaggacagccagcgcagctggatacaggcgggggcgggaatcatcgcgcaatctacgccggaacgcgaactgacggaaacccgggagaaattagcgagcattgcgccctatttaatggtgtaggagtaactgttttctaacctcacaaccagactgtccaaagacaattgagtcgctctttgattcctctgtgactctattgtcttctttttggataaaataggtgtttttcgtcatgaagttgataaaagtctatatagaaccacctcctgtagaggtggtggtaatttgccagagtgtgggattcgttagtatactatgggataaacttatttttaccaattgtataaggcggtgcataagattctcggcatgcttccagataatccgaccaccactgcatcatcgctttgcgggcttctaggtgctctgccttatgaatataagccatgcgcacggtattgcgctcctgatgactcatctggcgttctactgcgtcctttgcccataaacccgattccatcagcgcactgcatgccattgcccggaagccgtgaccgcagatatcctttttcgtgtcgtaacccatcacccgcagtgccttattgaccgtgttttcacacattggcttatacgggttatggtcgccggggaagatcagttcattattaccggtgatatccttaatctgtttcagaatggcgatggactgttctgagagggggacgatatgcggcattcgcatttttgccccgcggccggaataacgcacgccaataatgggttctcgcgtcgcgggtatcgtccagactcggtttgtgaaatcaatctctgaccagcgggcgaaacgcagttcactggagcgaatgaacacatgcagcatcagcagaacggcatgccgggtcagttcacggccctgatgatatgccccaatacgttcaagcagttcaggcagccgctccagcggcagggcaggatagtgccgtctgacaggaggtgtggtcacgccgccaaggtttgctgcagggttcgtatcgattaactcctgatggaccgcatggcgcattatgttactcaggtgctgccgtgtgcgggacgcaacctccagcagacctttttcctcgatccctttcagcaggtcaatgaaatgacggggtttaagttctgatacaggtaggttcccgatgaccggaaagatgtgattgttcaggctggcaagcagacggtcggcggtgttctgcgaccatttcctgttacttttatgccacgccagcgccacgtttttaaaaactttctccggtgttcgtgagccacgttcagcagcccgctgctgtaccgggttgatattcagcgccagcattttacggataccttcacgttgctgtcgcgcatcagacagggagatggctggataggcacccagcgcaatgcgggattctttaccgctaatacggtatttgagataccagtggcgggagccacccggcttgaccagcagatacagaccgtgggaatcggagactttaaagggtttatcagaaggcttgagggtgcggatttttgcgtcggtaagggacatatgggggtcactccattatcgaactaacctgaccccagatttgaccaccaatttttcccgatgcgtagggtaaaatcaaaatgcaccgggaagagttttcacactaacctgttgaatcaacatcagataaggattcgcaaggaagcatgaaaacagaaaattggctcctctgactggcacagacgcccgacctggtattgcttgatgaacccaccaatcatctcgatcctcccgggcgcgaggaactactttcccttgtaaaaaccaagggaattaccgtcgtggcggtattgcacgatctgacactgacagaatcatttgctgaccgtgttctcctcttgtcgcaggggcaatcagtgatctgtgacacaccggagagggtattggtatcagaatacctttatcccatctttggcttgaccagttttaccgtaccgcatccccatacaggaaaggcgttgcgtatttttgaagttccgcattgtgcataaattactttctgagagtcagtgatgaaaaaattgtttatatccctgctggcggtactgtctgcctcagtagccagtgctgctgattttcctgttactattgaaagttgtgggactcctgtcacattcgccggtccgccgaaaagggctgttatcaacgaccttaatatgtcagaaatggcgtttgcactgcatttacaggatcgtattgttgggctgactggtattagtggctggtacaaaatgacgccggaatttaaaaaggcgatgggctcgatcccagaactggcacccaaatatcccactctggaaacattgctggcagccgaacctgatttctttttcgctggctggaactatgggatgaaggtgggtggcgaagtgacgccggatacgctaagcaaatatggcatcaagacttttgttctgagtgaaagctgtgtgttcaccactgcgcacaaaaataaagccaccatggatctgctgtataacgatgtcctcacgctgggtaagatttttggcaagcgcaatgacgcacagtccctggtcagcggctggaaaaagaggttgaatgaactgccgaagccagcggcaggtacccgtcctttaaaggtgttcgtctacgactcaggcgaggataaaccgtttaccagtggtaaatatgcgatgcctacggccataattgaggcggctggtggtaaaaatgtaatggaggcggtggataccagttggggaacgacttcctgggaaagcgtggccgctactgagccggacttcattattttgttggattaccagacgggcagcggtgcggatgcactgcgtcattttcttgagaatcatccgttaatgaaactgactccggctgttcagcatcatcgatacctgaaattacaatatgctgaactgacaccggggcctgccaacgttgatgcggtggaaaaactcgcgcgggcgatgtacccgtcaacggcgaagtgatgctcatgtcgtaccgttatcactgggcgatgtggggagccatggtagtgctgattgggttgatgttattcagtattaccagagggacagtttcactgtcgctaatgtaggtgctgggagcactgaagctggtggatgagccggtatctgccatggtcagcagaattgtgacggatttacgcgtaccgaggatgttgctctctgtgctgacaggggcgggactggcaatggtaggggcgttgttacaaactaccacccgtaacgatctggccgatccttttttgttcgggctatcctccggcgcgtcagcgggggcggtgctggtgatcacccgttttggtgatcgacttggtgtattaacgctccccgtatcggcgtttgttggtggtgtgtgttccgccatagcagtaatgctgttgtttcattttaaaaagcaacgcggagctgagcatctaattctctgcggtcttgccatctcttttttgttcggggcgctgaccagttatttcattttttcgggcgatcagcgagctgccagctctgtgctgttctggtcactgggtggtctgggattagccacctggaataatttgcctttcgcagtgttcagcctggtgttgctgtttgcttttgtcctgttacggtggcgctctctggatggtgtgctggcaggagaacagacagcgttgtcgctggggattaacgtgagtcgtctgcgcatcgagatttttctttgttgcgcactggcaacatcgttgatggtggcattaaccggcgtgattggatttgttggcttaatggtgcctcatctgtgtcggcattttgcaggagttaagcatctgttgttgttacctttgtgtggcgtctggggtgcaatattactgtgtggcggcgatatagtcagccggacgatactggcaccgcaggaactaccaattggcattattacggcgggcattggagggttgtttattatcatgttactcgcacgaaattcgtccagaaatacggcctgttaagcacatataagacagaaaaataaggctctgatgtcttttattcattctgaaggttgaggttgttgacgccaattatgaaagcaaccgacaatccttgttgacggttatatttattatagagtcaggtaatagtgtgatggcttttagatattttaaaatttatttatcgcctgactcgatttcaatgattattcgtattggtgatttaaccctttcctcgacaatcagggcaaattactttaacttcaatatcttttttttgtacagcacaaccataatctattgcttttttctcaatgtaagtatgaatgaggtggtcagtatgttggattattgttccgcagtttgagcaaatcaaaaaaatagtcacaacatcagaggataaattattttttttgataaatttgctacagcattctatttttacgataatccctgcctgttgcaaataatccagagaacgataaaccgtagccggttttgcattcggattatatttcttcattaattccagtatctggtatgcgctaatgcctttttctttagcatgactgacgaaattataaactctctcccggagcggtgtgattcgtattttcttactctcaatcagctctctccgcccggaacaatccgtagacgataatgcagtgtcccttgtacttagagaatatgggctattactcaccgggcctcctgtaattttcaagcgatgttatcttttcttgtcctgaaacgatggaaatctactgatgttttgatcgtgccatgtaaggaaagaagaactggcaaattttattgttacgttataacataacacatgataagtgaggtgccaatgtttctcttactggaaaaagcccatgcaggtgcagtttttaaacttgaagatatcctggcatcaataccctgggattctcatggattgatcgctgcgattgcacagcaatatgacactggagaggtgttgatgcttgcctggatgaatcaacaggctcttgatgaaaccttattgactggcagagcctgttactggtcgcgatcccgatcatgcctttgacgaaaaggtgagacctccggctgcgttcagcaagtacatgatatccgtctggattgtgacggagatgcggtactactgcttgtggatcaaaaaggtggagcctgccacacaggtcggcggagttgtttttacaacgccattaaaggcgatgagctaaccgtgctcaacgatcctggttaatccgaacacaacgaatatctgaggagatgtaaggtaatgtccgaagtcagtgcaaattttcatggcgataaacgcctgccggttaccgtactttcgggatttttgggagcagggaaaacgacactgcttaaccatattctgaacaaccgggaaggccgtcgtgttgctgtcattgttaatgatatgtctgaggtgaatattgatgctgcccttgtgagggaaggtggtgcagaactctcccggactgatgaaaaactggtagaaatgagcaacggttgcatttgctgcacattgcgcgaagatcttcttctcgaagttaatcgtctggcaaaagaagggcgttttgatcagcttgtcattgagtccaccggtatatctgagcctctgcctgttgctgaaacatttacctttgcgggcgatgacggtgaaagcctttcgacggtggcccgccttgacaccatggtcactgtggtggatgcgtacaattttctgaaagactacggttcggaagacagcattcagtcacgcggagaatcgttaggtgaaggtgatgaaaggagcgttgttgacttgctgatcgatcagattgaattctgtgatgtgctggtccttaataaagttgaccttatcagtgaagcgcaaaaagaaaaactgatggcgattttacgttcgcttaatccacgggccagaatcgttgtttcacagtttggacaggttccgctgggcaacatacttaataccgggctgtttgatttcgagcaggccgctcaggcacccggctggcttaaagaactccggggcgaacatacgccggagacagaagaatatgggatcaccagctttgtctttcgcgcccgccggccttttcatccgacccgtttctggcaggtgatggaaaatgagctggatggagtcgtcagatcaaaaggttacttctggctggccagccgtccggaattcgcaggttcatggtcgcaggcaggtggcattgcgcgccaggggctggggggcatgtggtgggctagtgtgccgaaaggacgttggccagaggatgctgagtcactgaagttcatcatgtctaactggatagatggcattggtgatgcccgtcaggaactcgtttttattggaatggatatgaatgaatcagaactgcgcaacagactggattccgccctgttaacggatgcagaaatggcagaagggcctcaaaagtggcggcattattccgatcctgttgagccctggttcgaagaatgaatcgaaggcacccgcatttgtcgggtgccttcgtatgaaagcgaaaagggggcagatttacaacaattcttccccagcttttttgaaccactgtacaacactattcagatgttgttgcccatatagcgagacaaaacgtctggtttcctgatgatcttgggactcaaggactgccagacgggatgcaataaatgcctgcgtcaagggaattccacattcttctgtgatgcaccggtaccattgctggtaagtcttggggatcatacttatgcctcatgaataaataactgggatatcaccagagccaccaccagagaacttaatacctgttttcccgccactgctgctgcaaaccgccagtttatttcccgggcgatggtaaataccgtgacaaggcaggccatcaacgtagaggcgagccagacaagtagcagtaactgagatgtgctgagagactgtattaagctgccgccatcctgattgagcaccatcaaaccatctttccttagcagtgaaaaaatgatcccgggcatcagttctgctggcagtttaaaaagatgaagtaaaggtgccgtcgtttcactcagccagcgagtgatccctgcgtaatcaagcatccccgcaacaatgcagataatcaggaataacggcatggcttgcgtaatgaactgacggaggatatttttcagcatccatgtcacatttcgccagcgtggccattgtagccaggtgatctctgtcagacgctggttttggccaggcttcaacgacccgttccagaggcgcgtatgtattgcgcctgtgaaaaacagcagactgagataggggataaagagccatggttgatgggcggcattaaaaagagaaagcgtcgcccccgtctgatagctgcaagcggacccaaagctaatcatacttatacaagcatgccgggtgcatcgcgaacacgaacggctctgaaaaaccgccacgacattacagccgaaaccgcttaatacaggaataaggtcctgaccgctgaggccgagttttctcaaccagggatccagcgtcgctgtaattctttccttaagtccactgtcgtcagtcagcgaaagagacaaccctatcagtaccaccacaggaaatgcccatacaaacgaataaagtcccagactaaaaagaccgtaattgccgacaaatagtgtcttcagaacgtcgggccagctcgtcgttatattcttaagcggctgaataaccgcactgtcaatgacaggctgaataaaatctgacagcagccatgccccccataccggaacggcaaacagcaggaaaaggcatactattgcagcaacttttccacaccaacgatgttcaaatatcgtttgttgaggaaattcagccagcagattaattaccggtatcttttgacggggtaaagagacagcggagggtgcaggtttatcctgcaacagcaactgcactattccctggcgaacattgctgccagcttcccgggcattgactgccagtaccggcgcacctgatgtttcactcaggtattcagtcacttccagaaggccctttctgatcttatcagcaaaggtcaggagtataacaacgtgttttgcctgtggcggtatgaggtgacagagcgtttgccactcctgctgagcgtgcgtggcccgcagaaccaccagaatgccatcatgctgatttagcgcatcaagggcgagttttgtggtttcactgtcgctctgaaaacgtatgcctggcgtatcaaccaggcagatccctgcatcattaatgagaccttcccgacatacaacggtcgatcccctgaaattacgctcatcactggcagcactttccgtcaggatattaaacagggtagattttcctgcactttctaatcccattaaaacgaatgattgcataaacacggacctcagcacgcacagtcctcatcggcacagcagtcaggctctgaaggcagaacccaccagtcccgtactccttcagaggacaggcccagatgacgcgtgatactttctgccacgacgggaaagcgctgacggaacttatagataaagcaataaatattaccggcatgccgcacatgagggccgacaaggtacaaaccaggaaaaagggttgagcagtcttcgtccgttaagaccggatagccatcatcattccattcaaaaaaagcagccagttgccttgctcctccgccacactggaagccggtagcaagcacaggcacctcgtcagtagcccaggcgcgtccgtttgtggtatggactttgtacgaacttcccgggccgggcattctgattacttcacagacatccgcatcttcataaatttcgaaaagacggtgattcatcactctgttcaaacgctcacgggtataaggggaaagcgatagactgggatcgctgatgtggttagttgaccagggggctgagcgggttaacatttttaccgatgagccattttccagcaggtttacagcggcatccaccgcgctttcatagccgcctataacaatgtattcacctttcctgaaatccttccagctggtcacatcaccgtaatggcaacaaatatctgctccaggaaaaatctgccggtctgggaactggaattcgcctgtagcccatattaaagagcgtgtttccagcttctctcctgcttctgttatcagtataaaattaccggaactgagcaacgcaacctttgcaatcctggcgggagccatgacgggtatctgatactcatccagtacggccttaaggtaactggcataagttttccccccaggatgttcttcaccgcagaaaagcgccaatgaactgtcaggggtcacagagttcaggtctggttgtccaaacggattggaaaaaaaagaaggagtaataaaacgggtttcttccggccagcgcataaaggaggcacctacttcgtgactgtcaacgaccaggatatcctgtatggcactacgacgaagaagcgccgccatacccaccccggccggacccgcaccgacaataacgacttcgcgtggttggttcataaaattaccctttgcattacgttataacataacaattgatattgaaattttttacatccagagggacaacttatcggatacgccatgaggtattttcgccgacatcttcaagatcaatgccttgctccgctaattcatttcttaaacgatcggccttgtcccacttgcccatacgtcgtgcctcactgcgttggtgaattaacttttcaataagttgcagttctgcaggatgaagatcactgcggtttttcaaaaaggcatccgctgattgttcaagcaaacccagcacattccccaggtctttcagcgtggtggcaagtgctgcggcttcatcatcattcgttccgcaaagcctgttaatctctcttgtcagttcaaataaaatggcaagcgcctggggtgtattgaaatcatcatccattgcctcacagaatctggcccgccatgcatcgtgctgttcagatcgagacccgtcagcgaactggcatgcggtgtagagccgtgtcagcgaggcgcgcgcgaggtgaatattctcctcgctataattcagcggcttacgataatgtgcgcttagcaggaagaagcgcacactctgggcatcgaaccgattcagaatatcgcgcagggtaaaaaagttattcagcgatttcgacatcttctctttattcaccgtcaccatgccggtgtgaagccagtaatttacgtaagggccatcattggcggaggtggattgggcaatctcattttcatgatggggaaatatcaggtcagaaccaccgccatgaatgtcgaaatgggtaccaaggtaatggcagttcattgcggaacattcaatatgccagccaggtctcccttcaccccagggtgatggccagacgggctcgccgggttttgcccgcttccagagaacaaaatccagcggatcgcgtttatactcattcacttcgatgcgggtcccggcacgaagcatggtaatatcctgtcccgaaagctttccatagccttttgccgatgcagtggagaacatgacgtcaccattctctgcaatgtaagcaaattgtcgatgcagaagtcgttcgatcatactgatgatttgtgggatgtgctctgtgggacgaggttcgatgtttggcggcaggatgcctaactttgcaaaatcaatgtgcatttcatgcaccatccgctctgtcaggctgcgccagtcctctcccgtatcacgggcgcgctgaataattttatcatctatatcagtaatgttacgcacgaaagtcacatcgtatccgcgaaaacgcagatagcggacaatcatatcaaaagctacaaaggttctggcgtgcccaagatggcaaaggtcataaaccgtcacgccgcatacatacatgccgattttgctctctttaaccggaactaatagctccttttgcataccaagcgtgtttgttagtttaatcattacgtttacctcattatttttagatagcagcacacgaacacgcctggcgctaattaacagtcgtccggaataagaaaaaaattatttggtgatagtacgattacagtccggacagataccatgactggaaagggtaatttcccgttcggtcataccatgtccagtgagatgtgattttaccaattcaatggccgcttccagggctggatcctgctcaataggaataacatgatggcagttatcgcattcaaaaagtcctacggcagcccgttgggtcagagcgaaacgctgagttcttgccgagtcggtataacgctggacaatactgacctgcattagccgttccagtattcggtaaagggtcacacgatcgggagcctgctcgcccagttgctgagttaaatcgtcatggctcatggcctggctggcatgttcaaggcactgcagtgtagcaagggtggatggcgttgcccgcaaaccatgtgtgcgcaacgtttgcttccagtcatacgttttggctactggtgttgtcatatttccccctccgagtcatgtcatttgaattttggcaggaagccggtattattgcaacttgattgcattaacgtttagcggcataaggctggatgctatgaaaagaacaccgctcattatccttaatggttttctgggggcagggaaaactactctgctaaaaaaccttcttacacaggcacacaaacggcgaatgactgtatccgtcatcgttaatgacatgagtgaacttgatgtggatggcgtcctgatagccaacacagaaatcgttgatgcagccagtaacaattttgtgagtatttcagcagacagtatcagcagcagaagcgggatccagaagctggattccgcgctgaaaaacctgctcgaaaaacggtctgcggattttattttactggaaacctcaggtagcagccatcctcttcccctggtccgctatctgcgagaacatacccaggtaagtctcaaagcatttttgtctcttgttgatacggtcatgcttaatgatgactacgacggtggaaagaagcttattccggttttccaggagcacctcaataaaggaacccggggagtggaaagcctgctggcagaacagattatgttctgtaataagctcttattaaccaaaaacgaccggttacccttctatgtggttactgaggtagccagagccatacatccccttaatccccaggttgcaattatggccgtgccctggggaaatttacagctggatgaattgctttccatgccggattacgattttcatcgggtggcgttacttatcgatgagcttcaggatgccattgacgcagttttgccggatgaaaccgataaaaaatacgatatttcgtggagggtcattgaggatgaccgtccatttcatccgcagcggctgtgggatacctgccatcgcttcatgggcgcaggcgtttaccgcagcaaggggtttttctggctaccgggaagggatgacctggcattattgtggaaccaggcagcagggagcatcaatctcgaattcataagctactggaaagccggggtcctgactcacactgataattcattgacaaaggaagaacgcgcagctatccgtcagcaactggcaaaaatgcctggcagatttggtgaccggcgctgccgcctgactgttattggcgagagcggcgaaattgacgattttgccctcgcattgcgccagtgtttactcactgaagaggaaattctctggtggcagcagggggggattttccacgatccctggcccacgaaagtggcccggctggcttaacaggttattttgcagcggcagttaatgttatgttataacgtttcattacgcaattttatcggtacaggacatgactaaacctacccgcgctgaacgagaaaaaatcctggcgatgctgccagaagattacatgaatcctgtgcaacaggactacttccggcggcttatccgccacgaaaggcaggaggtgcttgatcatatagaccagatgaagcaacaactgcaggataatccagaaacgggtgacgaaggtgacatcgccattcgtgaagagcagttacgtctgctgttcagacagatagacagagaaagccgcctgttgccgaaatatgatgcagcgcttatgcggcttgaaaaaggagaatatggcttctgccgggatacaggcgaacctatcggtctgcaacgcctgctactcaggcccaccgcagaattaagtattgaagccaaaacaaaggaggaaaaagttgagattcagtaccgaaagaaataaagcggtggctcaggcagggggcagggtagggatgagagtaaatatcagatcaggcaggtatatatgagtattgcagccaaacaaaccttatgccccggaatgctaccggatattcagtccactaagggtgacggtgagggcgagtcattatcctgggttggcatggaacaaattgacctgccgatagacatcgcaggcaggccggtatcagcaaaggtcaatgctggcataaaccttctcagttcacctgaagctgaaaaggggatccatatgtctcgtctttatcttcttctggacgaactgacacaaggggaaatcacaccggcattattgcaacatgtgttgaaagcatttctggtatctcatcagggacgtagtgatgaagccagtattgagatttcaggggatttgttactgtcgcgtaagtcgttaaattctaatcactccggctggaaagcttatcctctgactctgagcgccgaactcaggcaatcttttacggttaccctcaaagtgggtatcccttattcgtccacctgcccggcttccgctgcacttagccgccacgtcgcgggtttgcagtttagcaaagactttggtaacaggatcgacaggctcccggcagcagaaatagccgactggcttgttgagaaaggaatgccggcaaccccgcacagccagcgaagctgggcatgggtgagtatccgtcttaatcctgaagcaaaatcactgcctgtgattgaactgattgattatgctgaagttgctctcgggacagccgtgcaaacggttgtcaagcggagcgacgaacaggcttttgcggtggctaacggtcagaatctgatgttttgcgaagatgctgcccgtcggctcaataacgtttttcgttgtgcacccttttgtgaagcatttgatatcagggttgagcatcaggaaagcctgcatcctcataatgccgttgcccgtattcactggaaaggaagtaaaaatgttacgtaaaaacccatcaggtcataccccagtggtgtcaacaaaggcctatatcgatcccaccgcggtaatttgtggacgtgtcattattcatgattatgtttacgtcggaccttatgcggttatccgggctgacgagctaaatgcagacggggatatggatcctatcattatccattcccactctaatattcaggacggggtggttattcactcaaaaagcggcgcgccagtgacaataggaagcggaacgtctattgcccaccgtgcaatagtgcatggcccctgtcaggttgacgagcgggtatttattggattcaacagcgtgttgtttaactgtcatattcagactggttgtgttattcgctataatgcagttgtggatggcgttaccttgcctgagaatacctatattccatcaacggaacgcgtggggcctgattccgatcttaaaagttattcgagggtagaccccgcttctttacaattttcagaagaagtggccagtaccaacgttaaactggtcgaaggttatcagaagttacgcaatgaattctgagtatggctcggctagtgccgttaacgtaacaccgtattattaacgatttgttattaatgtagcaaaatgatacttgcctcttctttccttttgcggaagaggcttttctgttttattaaagaggtagcggtgaaactttttattaatgatctgacggtcatggattttagtttccttgatgcggaatccgggttgattggcgatagccttattgttgatattattcttgagggagatctgaatgctgagtcaatggtaatggatttctcacatgctaaaaaaagtatcaaacatgaaattgataaactggccgatcatgtcctgattgtgccggaacaaaatagtcatattattgttagtcatgcaggcactacgacggaagtcgccatgctgcgtaagaatggggagacccagtgttttatttccgggccgcaggagagtttctggctggtccaaacagataatattaattcccgttgccttgaatcccaaatagaaaaacatttactggcgtgtttgccgcaaggagtaaaagacataacgataacgttacggccggaaagtattaatggggacagttatcactattcgcatggactgaaaaaacaccgcggaaattgccagagaatagcgcatgggcatcgctctgcgatcagaatttttgtggatggtgagcgaagccatatgtgggaacagaagtgggcaacgcgatggaataacgcttatctattaagccgggaagatgtcgttacagtgacaacactttcaccgcgtggcgttgcatactggcataaggggctgacatgttcttcctggcggagttctcagggatactttgaaatcatgctttgttctgaggtagtagatattctgccgtgtgataccacggttgagtcactggctttatttatcaggcagtcaattgagcacggtttacccgcagcgaaaatagaagtccatgcctttgagggagtggggaaaggcgctattgcctgacacactattctacttttcaggggtattgatctgttttgtctcgtaaaactacaatacccggttttgtagccatgtatctaataaaaggtgagtcaactacctttctatttttcgctaatgacgatgcatttctgaaccagatgttattgtggtctttgataatgatcccaacatgtgaaacatccaggcctctttttgttgaataaatacccacataatcacctgtttgcagtttatttattacctctttatctattgcagaagccggtatgtaacttatccgtcgtgagataatgccgagacccttaacatattcttgttttttattcttttggtttagctgtttgttgacagtaatagtatacggactgatgtcctgagtaacatcttgtgcatttcgcggagatatgaccgcccagtccgtgaaaaaatgttttctgccagtaaaatcaatcattccgtttgtataacgagtcttaacaagttcagatacataagtttgccagctactggcgtgcgccatggagcgaacataatcaagaaaagtaaaacaatccacggtactgggattagtgaccagcctctcttgcatcgaagatgatccaatcagtgtatgcgcctggtaaggcgttccgaggaaacgggaggatatctcagcaacgcgttcattatagctgaggccatttctgtacaacgaagtggtatgaaggattttgttaactttcgcctgactttcttcaatagaatagtcgcttcgtgcctgctgaggctcagcgaatcccacgcagctataaaatgaaaggagaaagataattgcttttttcataaaatatcaaacttcctcagagatatttctcattatatttaaagcttgagtatataaaaaataactataaatatcagggcaaaaagcaaaacaaccgttggcgcaggcgcactatcaatgaaataagagaggtaaacgccggtcgttgataccagagccgataaagccacagcgatgaataatgcgttgctaaatcgttgcgtcaaaagaactgcaatagcaccgggcgcgataagcaaagagacggataaaataatccccacggactttagcgtggcgacaacagtaagcgaaatcatgctcagtaatccgtaatagagccatcccgtccgtagtccactgaccctggcctgctgaatatcaaaacagtaaagcaggaaatcacgccatttaattccggtaatcagcagtataaataaggcaatggtgcccgtctggagtatgtcggtggcgtttataccaagcatgtcgccaaagaggatatgttcaagcggagcatccggacggactgagacatacaaaatcagtccggaggcgaacatacccgaaaaaatgatacccagcagcgtatcctgctttatgcggctgttatctttaatatatccggtaagtaaagcacaggataatccagccacaaaagctccggtgcctaatggcaaccctacaatccaggccagtacaaccccgggaaacacggcatggctcatggcatcccccatcagagcccaacctttcagcacgagaaaaacagacagcagggcgcagggaacagagaccagcagcgcgattatcagggcataattgatgaagtcaaagcggaaaggttcaatgagcatattcagcatttacgcggtccttttgactgagaaaccgatcggcggttcgccagtaagccatgtaccggggcgaaaatgaacaccagcaagaaaatgagggtctgagcgaccacgataatgccacccgttacgccatcaaggtagtaacttgcccacgcacccagaaagctggtgacactgcctatggtcaccgcaatacagaccaggcgggggaagcgatcagtaagcagccaggccgttgcgccaggcgttaccacaaggcagatcaccatgaacgcgcctacggtctgtaatgccgcaacggtggagagggttaacagaaggaaaaataatatcttaagcctttccggatgtaatcctaccgcccgcgcatgattttcatcgaaaaaggtcagtaataaatctctccattttaataacaacgtaataaccgaaataatgccaatgacggtaagctgaagaatatcttctggcggaaccgccaggatatttcccagaatgattgattgtatatttaccgaaacaggattcagcgagatgataaataatccaagcgcgaaaaaggatgaaaagatcaaaccaatgatgacatcttcttttagacgggtacgttgattaagaaggaacatgctgcctgctgccagcccgccagaaacaaacgcacccaccgagaagggcagtcccagcataaaagcgccagctactccgggtacgatagaatgggacagcgcatcgccaattagtgaccaacccttcaacatcagataacaggataaaaaagcacatattcctccgaccattgccgaaatccacatggcattgagcatgtattgataaccaaaaggctccagaagccagctcatgatgacctgcctttatcttcatattcagcggaaggttgataatttggctgtgttgatcctccctgaactggcaatatatctgactcactctcaatgtttgcactaaacgtcttttttatattttccggcgtaaatgtcgtggcgacaggaccgcttgccagcacggtgcctttcaccagaacggtataatcacaatattcggatacggaggtaaggttatgcgttgaaaccaccagggtgctgccttcttctttcagttcgccaagcagcgtgatgattttcttttcggtattgacatccacaccggtaaaaggctcatcaagaaggattactttgccccgttgtgcaatagaacgcgcgaggaacacccgcttcttttgccctccggataattcaccaatctgccggtggcggtaaggaagcatatctacacgctcaagcgcatcattaacgatcctgcgatcttctttacccgctctacgcagcatacccatatggccataccggcccatcatgacgacatcttccaccaataccgggaacgaccagtcaatttcctcggactgaggtacataggcaataatattgcggcgaagcgcctgtgcaggaggcatcccgagaagtgaaatcgttccgcatgaaggggatacgaatcccatcattgccctgaatagtgtggattttccggaaccatttacccccagcagggccgcgttcgaacctttagggacgctgaatgatgcattctgtaatgccttatggccgttacgataaacaacagttaagcccgctactgtgatgcctgccgcctggctcatcttttactccttcattccgctgtgcaaaccctgtaccactgtccgggtagtgacgttcagcagatcaaggtaggtgggaaccgggccatttgctgcgctcagggaatccacataaagtacgcccccataatgtgcacctgtttcgcgtgcgacctgacgggctggtttattggaaacggtactttcgctaaataccgccggaattttattctgccggactttatcgattacgttacgaacctgttgcggggttccctgttgatcggcattaatcggccatagatagagttctttcagtcccagatcgcgtgccagataagaaaatgcgccttcgctcgataccagccagcgctgttcggcagggagggtttctatttgtttacgcagcggttcaagcgtctgacggatcttttgtttataggcgtccgcattggctttgtaagtttcagcatttccctgatcgtatttcaccagcgcatcacgaatattatctacataaatcagtgcattatcaggcgacatccaggcatgaggatttggttttccatcatacggaccctcggtaatgcttattggagtgatacctgtagtgaccaccacatccggtacgtttttcaatcgttgataaaatttttgaaaccagagttcgaggttgaagccatttgaaaggattagctgtgccccctgagcacgctttatatctccggttgtaggctgatattcatggatttctgcgccaggccgggtaatcgaactgacttcggcggcgtcccctgccacgttctgtgccatgtcagcaattaccgtgaatgtcgtgatgaccttaaacttttcagcagcataagcgccatgaatagctgtcagtcctgtgataaaggtgcttaacaggattatctttaccgtctttagttgaagcatggttatctcctgatgaaatcactgtttgttaataattagtaatgttataacatagcttatactatgcaacatagcacaggctatatttaaatgagaaaaattatctttatcatttaagagctgatggcacagtatttcatggcttatgcaagcgctgatatctcagacatgccacttttaatgcaacatggttgcgttaaaatgtgcattaatgcaacatagttgctgttaatcactgagctatgttgggatatgaaaatgtcagaagcgcctataacagagtcagaacctctcacttttactcttcctgatggctctctgaagcacgtcagaaaaggggcaactttgcagaacgttgcagaaagcatcggttcttccgtcgcgaaaagcgctgtgtacgcggaaattgatggtaaatgtgtggatctgcttgagaaagcaaagaacagtggaaagctcaatatcattacagtttttgatgaagaagcgttgggcccgattcgccgaggttgtcttctccttctcgcagcgtctgtaaaacagctgtttccctcggccaggatggttgaagggcaactgactaaggaagggttttattacgatttcgcggtagataaaccttttactcgcgatgacctggggatgattgagcagcacatgacaagtctgatcgctgaaaacccgccgattattaaagagcaggtcacgcgggcacaggctattgactgttttgagcagcggggcgagaaattcaaatcaacggagttgatggaaatactggcagataagtcggtgacactatgccatctcaggcagttcacggacggctttaatggcccattggttccggatcttcgttttctaaaaaatatgaagttgcttaacgtatccggtgcttactggcgtggtgaagccaacaatgtacagctacagcggatttatggcacggcatgggccagcaaaaaacagcttgatggctggcttgagaaaacggcagaagcggagaaacgtgatcatcgcaagctgggtcgggagctggatttgtttcattttcaggacaatgcgccaggcgcggttttctggcatcccagggggtggacaatctttcagtcgcttattgcctatatgcgtagccgccatgaggtggcgggttacgttgaggtcaatacgcctgatgtcatggaccgcagcctgtgggaaatttccggtcactgggataattatcgtgatcatatgtttacgacacaaaccgaggatggccggaatttcgctctcaagccgatgaactgtcctggggcggtatcgctgtttaaatacgggatcaagagttaccgcgatttacccgttcgcctgtctgaatttggtaaagtccatcgttatgaaccctctggatcgctgcatggcttattacgggtccgccattttactcaggatgacgcgcatatcttttgcacgctgcaacaggtcgagggggaatgtaaaagtatccttcagttggtgcttgatatttataagcaatttggatttgaagaggtcgcaatcaagttatccactcgtcctgaaaagcggatgggaagcgacgcagactgggataggctggaaaacgcgctctcagcctctctggaagcgcagggattacaatggtcggtaaatcccggtgaaggtgccttctatggccctaaactggagtttgtgttacgcgacgcgattggtcgtgactggcagtgcggaacgctacaggtggatatgaatctgcctgagcgatttgatattggctatattgccgaggatggctcgacaaaacgcccggtgatgttgcacagggcgctcttcggctcccttgagcggttcaccggtatccttcttgaacattacgtcggtaaactgcccgcctggctgtcgccggttcaggccgtggtcatgacgattaccgacaagcagcatcactatgcggagcaggttttgaaggcgcttcgcaagaaagggctgcgttgtgaggccgacctccgcaatgaaaaaattggatttataatccgtgaacagactctggcccgcattcctttcctgctgatcgttggcgatgcggaggagaatgcggcgcgtgtcacggtgcgcgatcgtaccgggaggtgcatggggacgctgttactcaatgaggcggcagacgctatcaaaatatgttgccagccaccggaggttcaccttgattaagcaaagcagaagcgatatcccccgacgcgagagcggtcgtcacgtctggccggtgaaggaggatgatacccaaagcaacgatatcgatttttataaaacggcgttcagagaacagtccaggcgatgggggctttccgagatcattcttagtaatactggtgatggagaaatatcactctatcagtctgttaatcagggggcagatgttcctcacgtactgattgcggcagggtttcatggagaagaacccgcgggatgttgggggatgctggattttttgcgcgagggctcccctgaattgtttgataacgtagccgtgagttttttaccgcttgtaaacctctctggtctgcgcactggtagccgccttaatagtcttggacagaatccaaaccgaggctttaccaaaggtgcagaagtcgagccttctattgaaggaaaagtactgctcaactatgaaacgcttctgaaaaacgcagcaagtcatggtgtgctctgttgccatgaagatattcttcgtcataaggcgtatctctacactttcgaacatgctactcgcttgggtcatttcagcgtggcattacgtgatgaacttgaacgctttttcccggtcatggaaaaagagcgagttgatggttgtgaatgtgaggatggcattatttttaaccatttcgattcgtcatttgaatcatggttgttttcttcctgttccgacgtcgcagcgtgcactgaaacgccgggattgcaaccctttgcaaaacgagcagaagcaaaccgttatttaatcggcgcgtttatctcatcgatactggagcgcaacagcatcgggagcgggatgtcatgaagcctttattactgaccaatgcattaataatcaatgaagacttgcgctatccggccgacatcctcattgataaaggacggatccagaaaattgcctcgcttattccctcccgaacggaatggcaggttattgatgtgcgagggaaatgggtgatccccggtatgattgacgatcaggttcatttccgcgaacccggtctgacgcataagggaaccattgccagtgaatcagctgccgctgtaatgggaggcattaccagttttatggaaatgcctaacgttacgccaccaacaacgacccttcaggcgctgcgtgagaaatttcaacgtgcctcgcattcttcgctggcgaactacagtttttacttcggcgcgacgaacgataatcttgacgaactgaaagcgcttacggcttcgcaagcctgtggggtgaaggtgtttatgggagcttctaccggaaatatgctggtggacgatgaacagatcctggaaagtattttcgccaacgcaccctgcctggtagcaacacattgcgagcataccccgacaataaagcataatgaggagacatggcgggctcgtttgggggacgctattcctgctggcgaacatgccgctattcgttctgtggacgcctgcctgacatcttcccaccaggccgtctctctggcgaaaaaacatcgtacccgattacatgtcctgcatatcaccaccgcagatgaactcgctctctttgatgctgctcccacgctggaggcgctgcgccagaaaaccattacaactgaagcctgcgttcatcacctgttttttaattatgacgattatgaaatgctggggcataagctcaaatgtaatccatccgtaaaatcctcttttcatcaggaagccctctggagaggcgttaatgaaggcattattgacgttatcgcgactgaccatgcgccgcatttgctggaggaaaagcagaatgactattttgctgcgccttccggcttaccgctggtgcagcatgctcttcctgcactgctggatatgagcagcagggggatttttaccccggaaatggtggtgagaaagacaagccatgctgtagccgagcgcttccagctcaaagatcgtggctatatcagagaaggctattgggcggacctggtggttatcgatccgtttagtcatcaacagataatccgggaggatgtggcatacaaatgcgggtggtccccctttgaaggccggattttgtcaggcggggcggttgatatgacgctggtaaatggccacgttatctggaatgggcgcaccatacagcagaagtacggcctgccactggaattctgtcgctagccacgtatttattttgctcaggcataacttctccccgagaattcagaagaggcaaatcttgtgagtattattattcctggttctttcccggcacgacgactgcgccgttctcgcacccattctttcagtcgccgtctggtcgctgaaaatcagctgaccgtagatgacctgattttaccggtattcattattgaggggcaaaacctgcgacaggaagtgccgtcgatgccgggcgtatttcgtctgtcggttgatatgttgcttcatgatgccgcgcaatttgttcaggcaggtatacctgctattgcactatttccgtgtatagaaagttctgctaaatcgctgatggcagacgcttcgtgggatccatccggtttagtaccgcgagctgtaagggcgctgaaaaaggcttttcctgaactcggggtgataactgacgttgctcttgacgcctatacgacacatggtcaggacggcatcactgacgaaaatggatatgtacttaatgagccgacaaaagaaattctcaccagacaggcgcttacccacgccgaagcaggcgcagatattgtcgctccaagcgacatgatggatggccgcatcggtcatatcagacaagcgtttgaaacgaatggactgcttaatatccagataatggcgtattcagcaaaatacgcgtcgaactattatggtccttttcgcgaggcgacgaaatctgctgtatcactgggtaaacgggacaaaaaaagctatcagatggatccggcgaatgcaatggaagctatgcatgaaattgcccaggatttgcaggaaggggcagacatggtgatggttaagccgggcatgccttacctggatattatcagggaagccaggaaaacttttgcagtacccgtctttgcctatcaggtttcaggggaatatacgatgcatatggccgctttccgaaatggttggctggacgaagaaaaaacggtgcttgaatcacttatgtgcttcaaacgcgccggggcggatggaatactgacttattttgccaatacagtagcccagttgcttaatcaacataaacgggaatattgattccctgttgacaaaattccttagtcgctaagcaggagcaccgctgagagtaaacgtcataatcagcgagaatttctatactttaattcttatctttattgcgaattctgacgaatcgtttgtatcagcccaataatctggaggaagcagttatggtcgaaaccagtaaacaggaccgtatgccttatctacttttcctgtgtgaaaaccgcattcttgcacagaatatcgatggtcatgtcattgatcttggtggattaaccaaacaaaacggcaccattgactggcttctggatagcaataaggaaaagggggaaaatctcaaaacagaaatcgaagcgctggaggatattgccaataagatagattttctttttcttgatggtcagtttaccagccttcctgacatatcggctgaatataaagataagcttacatcagccccttcaatggaaatcgtattgaatgaacttggcgataagccataagaaagcccaacgtcaggaagctgataaaaaggaggaaaggcatgtcggtcaaaaaaatagcagttattggtgcaggcgtactcggcctgtccgtggcccgctccctggcgcaacagggagcaaaagtcactgtttttgagcgtagccatgtgggggcggggacaagcagcacgacttttgcctggattaattcaaatggcaaaacaccagaaagttatcatcatctcaatgccctggcgattgacgagcatatccggctacaacaggaacggaccacagaaggtcattggctaaaagcgactgggacttatgaatgggcggctggtgcgccagagcaaaaacggttacaagaccgggtcagccgtcttttggaactgaactatcctgttcagaacctttccgcagatgaacttaagcgcaaagttcctgaaatccgcgtgggatctcatgccggagatatctggtattttccaggtgaatgcttactggtaccttccgtttttatggcatggctggtgtccgagcttcatgttcataacgccgaactgaaaacacaaagcgaagtgacagagttaactgaagaaaaaaatagggcagagataagccttgccaatggcgaacgttggcagggagacagtatagtcattgcggcgggaagatggtctgccgaactcgcttcgctacttgggcagcaactggcaatgatcgatccgaaccagccgaataaaatcgcatgtggttttctgggctatacgcgcccggtgttaacccagttacaggcgaatttaatcacgccagggttaaatgtccggccagaaggaggggggcgattactgcttcagtgtcccgaccttgacagctttgccaatcctgcaaatccggcaccggtagatagctatatcggtgaagaaatgcacaaaaggctacggaagctatttaataatatggaaatggcacagctggaacgtatagctgttgggcagcgttcccgaccggcagatggtcttccagggcttggttatatctctggtaagcgacgaatctacctcatggtgacgcacagtggtatgactctggggccgttgatcggacggctttgcgcggaagagattctccacgataagcgttcttcgcttttgagtgatttctctcctgaaagattacttgggaaaacggcaaaggattttcctgcttttactacgttacatttcccggctgcacagtaatttttcagtcgatgttcaccactgaaatgaggatcagaaagctaataaactagatcctgttcagcggcattaacaaaaagcctgtccaacatgggcaggcctgaagcgtttaagcttgcaaaaatacgacaaggtgtgtgatgtcaggctatatctggccattatagcccgcgtacgcattggttacagtcagccagaacgccttctgtagaggaacatcactacccaatagtatcatttttttgtgggtgtgttatgttattttataacatccaggctcatattccgcataccgaaagataactagttgttatgcgttttctcatactgtagtttcagaggaagatttaacaagaggttaacatgaaaatcagtaagatagttgcattctccctgacaatggcttcgactccggctctggcatttcaggcgaaagatacgactggttcagatctttcaggaaagcagttgcgcgcaacagaagacagcatcatcagtaacttttacagccagcatagcaggcagtttcagacgacgactttaggaacctgtgctgctgtggcagtacctggatgcaattgccctttctgttcaatgttgcgtaatcaaaagctttgagagagttaaataaatatattacttgtaagagctgaaagctgaaaagattctggtgtaatcaactagagcagtaaatgctgtaaagtgaggtgaatagtatgaaagggaatttgatattcatggatgttattcccagggtaaattcaaaaagattattaaagccagaaagtagatctgctatcagcagatctactatgaaaggcgttgttaggtttgacaagtattaatgagcgtgatcatcatgatgatgagcttcatgatcgtgatgttcaccatgtacttttcctgaaccgccgactgcaacaatattaaatggctgcccttcgacgctaatttcactggtctttttaaaagaagtagcgtctaacacaataattttacttttcaacggatcggtgacgtaaattttattgtcagctactgcgattctcggccgtggatcattccagtggccatccattgaatagggatcagtgacacgcactgactgcgaaatttcccctttcaggacatctatttgattaagctttccgtcttctgtaaacacataggcgaatttcgcgcgtaccgggtctacaacgaaatggactcgacgggtaggcaactgaatcaaacggaagctatccgattcggtaggatcgaccagaataatccggtctggcccataattaccgataaaatattgcattcccttaccaccgatcaaggtggatgtgcttccctctggcaacgttttcgcgtagggaaggtgcctgataaccggtgccgcatttttttgcgtaatcagcaggaggccagtctcacatgatagggcaaaagtatcacccgagccggctgagccgtgaagtccggggcataaggcatcatcacccacttttttaccttgcaggtccaccacgcgagcgccgacaggtcgttttgacgcatcatcagggttgggaatggatacgacagcataattatcgtaaggaacagcaacgccgtgatgtggcgcaacaacatttactttcgttatattcttctgacctttaagaacggcgctttcacccaggatttgcgcgctatcttccccgtcaaaccactgggcaattttgccctgacgttcaacaaaatgaccaggttttttacccgttagttccagcggtaataatttgggagcgtcaatatcaatgtctgcatgatctccgtgatcatggaaagcaatgcctgaagcgattgtagatactacgccagcactaccctggatagcgaaaattgtggcaccactttcgctgcgagataaatttgcagggcctttaacattaaatgttgcgagcttatctccatccagtgcatcaataacattcacaacgggtttatcatgatcggcgatgaacagacgccatgcggttacgtcttcatctgcgaaagcaggcatcacagaaaggcccaaaagcagcgttgagattgaagtagataataagcgtttcttcataatgttctccatcatatataaaactgttcggcgggtatttatggctgggtattacggctattgctcgccgctgtcgcaatcgccgttacgttatgttccatcatttccaggtaggtagaagccggtcctcctggttctgacaaggcatctgtataaagcacgccagccacgttaaggccagcttctctggcaatttgttcaaccagacgtggattggaaatattttcagaaaaaacagctgatgcgttattttctttaattttcttaagtatgccggcaacgtcagcggcagaggcctctgattcggtggatataccctgaggggaaaggaaatgtataccatatgcctgttcaaaatatttgaatgcattatggcctacgacgacagtacgcttttcctgtgggatcgtagcgacagtcttaataattttattttccagatccgcaagttttgcatcataagcacgggcattagcctgataaaaatcacaattacttttatcttgtgcacaaaaggcttctgcaatatttttcacatatattctggaattccctactgattgccaggcatgtggatcaaacggtgcagcatgaaagaccgctttaccgtcataaaaatgatagtgtccgcctgccgggtcctggagaatatttgctccttttgttgtttcaattaccggtgcggaagtttcacttgcctcgatcaaccgtgaaataaagccttcaagttgtaaaccatttaccagtatgacatccgctttagacatagcgatcgcgtcagcaggagagggctcataaacatgggcatcgccattagggccgacaatagtacgcagttcgatgcggtcccgaccgatgttttttgccatatcgccaataacagaaaagcttgctatgacattaattttcgctttcgccgggaaagtaaaaagtaaaaaaagcattgatgtcgtcaggatgcataaagatataaaaccgggttttctcattaaataatttcctcgatttgtagtgaaaagattaacgaagtttttttaagtggatgtttttcaccatcatggcagcagcagagacaagatacataattcccacagataatatgattgacggtcctgaaggtagtgaaaaatgaaatgaaaataacaaaccgcttatacatgcaagcattcctatcaggacagaggctatgcacattgttgctacacgtctcgtccagaaacgagccgtcacagctggcaagaccattaccccgacagagagcaaagtgccgagtgcctgaaaaccagcgacaagattcagtaccaccagggccaggaaaataaaatggactggcgatcccaatcgtgaaacggagcgaagaaataaagggtcaaggcactcagcaataagtgcgcgccagaatatagaaaccagcagaagtgtgagcagcgcgacagagaaaattaacaacagcgcttcgtgattgagtgcaagcacagttccaaataggacatgcataagatccacgcttgagcctcgaagcgatacaatgagcacgccgactgcgagtgagattaaataaaaagcagccattgaagcgtcttctttttgcactgttaagcgggaaaccgcccctgcaaaaatagcgactatcagccctgcgacaagcccaccaatagtcatcggtaatatatctaatccgtagagtaagaagccaaatgcagcaccgggcaagatagcatgtgacatggcatcaccaaccagactcatacggcgtaatgttaaaaaaacgccaaccgggcaagcgcttaaacaaagcagaaatgaaccataaagcgcccggcgcataaaaccgaagccgacaaaaggtgctagaacccattcatgaagccagttcatgaatgtgtagcctcatgttgcccaggtaaagcacgtgctgtgcccatattctgtgccggtagaagtgaggtatggcgcagaacttgttctgtttcgtcccatgccactaatttaccgtttaacaaaatggcctgtggaaaatgatttctaaccagaccgatatcatgcatgacagctaagacagtacgtttctgagcatgccagcggtttatcagcacaagcaagtcatcaatagtagtggcgtcaatggcattaaaaggctcatcaagcaagatgatgtttgcctgttgaagaatgacccgtgcgaagagcgcgcgttgaagctgccccccggataatgcactaagctgtcttttttcaaaccctgctaatcctactgatcccaatgcatcagtaagccgtttacgatcctcaattctgtgatgacggaataaccctctttcaggccataaacctagggaaactaaatctgaaacagttgcagggaaagtgcgatccaattccgatatttgtggcagataggcaatgcgcgcctttggttctacggtacaggagccacttaacggagccagaatccctgcgatacctttaagcagtgttgacttaccagaaccgttagggccgatgatggctgtaagggaccctttttgtatcgtcccggtaatattttgtatcgcaggtaaaccctcataacccagcgccagatttgcaaaacgcaaagagtagtcgtgcatgacatccattccacataataagttactttttgtaacgttataacataacaaatgtaatgtaaacgtttaatcgattttttgatatggaacgtgcatgtacgaagccaggcttaaggtagcgttaaaattgataatcgtttcagcgagtaagagaaaacataaaaggctaaggttaattccttcagataacagcgagattaaatatttgatacctagggaatgttgggaggatcaagctgttgccataaaaaatggtgcccaaaagggcaccagatgcatcaggtaccgattatcccgccattcgatttagtgataacgactgttgaagaacgtggtcgtccgtctgatcttgaatctggccagttggagatagcccgagggttgctcggatcggtaatgtcgtcgccgccttcgccgggatgctggatattaataaacagcgtacggttgtccggcgtaaaggcgataccggtaatttcacacccgcgtggcccggtcaaaaagcggcgatactcattggtgccgggcagggtcgctatcatctggttattccccatcccttcatacgcctttttattaatcgtactggaggaaacatcagtctggatccacagcacgccgcggtgatcgaaggagagcccatcagggctgccgaattctgccccctgcatggagcctttcgctttaggatcgtcactgtcagtacgcccggcgagcaccagaatattccacgtaaatttcgctgaggcggggtctgccctctcttcgcgccagtgcatgatatggccgaactggttgttggcgcgcgggttggctgcgtcaaccggggctttgccctctttaccgcgatcggaattgttggtgagcgtgcaatacacgctgcctttcgcatgggtatcaacggctatccattccgggcgatccatttttgttgcgcccaccgtatcggcagcaaggcgcgttttgatcagcagatcgccctgattgtcgaaacccttgctttgatcaaggccattttcaccgaagattagcggcagccagtcgccggaaccgtcgtcattgaatctggcgacatagagcgtgcctgactccagcaactgcatatttgccttgcgatcgccagggtcatatttgttctcggagatgaatttatagatgtattcaaatttctgatcgtcgcccatatagaccacaacgcgattatcccccgccagcgtcacggcggcaccttcatgcttaaagcgacctaatgcggtatgtttgcgcggtgtggaggtcggatcgtaggggtcaatctccaccacccagccaaagcggttcggctcgttgggcgttttatcgacgctgaaacgttcgtcaacctcgttccagcggtaggattcatcgctatcgctaatgccgtagcgcttctccagcacgttacgcggcgcttttttaacaaaaatatccgaccagttctcttcacaggtcaggtacgtcccccacggggttttaccattggcgcagttttgcatggtgcccagtaccacttcgccttgcggatcggcggcggttttcatcaacgcctgatgacgcgccggaccgctcagttgcattggtgtattaacggtaatgcgacgagcaaagctggagggacggactacctgccagcccacgttatcttttttcacctcgataactgatatacccatcgcattctgacccttacgggccttatcaagatcccagttggcggtaccgtctttaaacagcatgccgttatcaatgtactcatggttgagcgccagcagaccgtgtgccgggttctctttgccctgcggcaggctaaaccaggccatgccgtcatggtgcataccggcctgcgccgcctgttcgtcggtggtgttgctagcgtcgaatttaaattccggcagattaccctttatgcccacagcatcgccccagcgataaaacggacgggctatatagccttccggcacggtgacagtgtctgctgtcgaaacgggaatgctggtgaagcccagtgacaccgctttagataatgctgagggatttgccttcgccgcgaaggcgttttctggcttgactagataaggaaaggagacggcagcgcccgccaccattcccatttgcagaaagcggcgacgggacataaaagcgctgactacctcagaaaagacggggttcacgctgtggttactgatctcatcgctgtgctcctttttaaacaccgatttaagggggctgctcatatcgttttcctgtaatttccatagatttgcgtggcaatacaggacagtttaaaaaatatttgttacaaatttataacatgagaaataacggaggttcaggagaaaaagctcactggcatttttgtattactgataaataaagccgtccccacctaagcggagacggcttcgttatactaacaattcagcggttctcctgaaccatcatataaggcgacacatatgcttttctgcatatatccagatagtccgaccaccactgcatcatcgccttgcgggcttccaagtgttctgccttgtgaatataagccatgcgcacggtattgcgctcctgatgactcatctggcgttctactgcatcctttgcccataaacccgattccatcagcgcactgcatgccatcgcccgaaagccgtggccacagatatcctttttcgtgtcgtagcccatcacccgcagtgccttattgaccgtgttttcacacattggcttatacgggttatggtcgccggggaagatcagttcattattaccggtgatatccttaatctgtttcagaatggcgatggactgttctgagagggggacgatatgcggcattcgcatttttgccccgcggccggaataacgcacgccaataatgggttctcgcgtcgcgggtatcgtccagactcggtttgtgaaatcaatctctgaccagcgggcgaaacgcagttcactggagcgaatgaacacatgcagcatcagcaggacggccaaccgcgtcagttcacggccctgatgatatgcctcaatacgttcaagcagttcaggcagccgctccagtggcagggcaggatagtgccgtctgacaggaggtgtggtcacgccgccaagatttgctgccgggttcgtatcgattaacccctgatgaaccgcatggcgcattatgttactcaggtgctgccgcgtgcgggacgcaacttccagcagacctttttcctcgatccttttcagcaggtcaatgaaatgacggggtttaagttctgatacaggcaggttgccaatgaccggaaagatgtgattgttcatgctggcaagcagacggtcagcggtgttctgcgaccattttcggttacttttatgccacgccagcgccacgtttttaaaaactttctccggtgttcgtgagccacgttcagcagcccgctgctgtaccgggttgatattcagcgccagcattttacggacaccttcacgctgctgtcgcgcatcagagagggagacggcaggataggcacccagcgcaatgcgcgattctttaccgttaatacggtacttgagataccagtgacgtgagccacccggcttgaccagcagatacagaccgtgggaatcggagactttaaagggtttatcagaaggcttgagagtgcggattttcgcgtcggtaagggacatatgggggtcgctccattatcgaactaacctgaccccagatttgaccaccaatttttcccgatgcggagggtaaaatcaaaatgcaccgggaagagttttcacgctaacctgttgaaccaacatcatataatgattcgcaaggatgcatgaaaacagcaaattggctcctctgactggactcgaaccagtgacatacggattaacagtccgccgttctaccgactgaactacagaggaatcgtgtgaacggggcgcatgttagcgagtgtgttacgggatgtcaaaggagaatacgtctttttcgatcgttcgctggtaaattcagcagtagcggtgattttattactatttaagcgaaaatttgagcgaattcagagggatgaaaagctaaagttgtggaaataaaaaagcctgctcgtaagcaggcttttttgaatctggctcctctgactggactcgaaccagtgacatacggattaacagtccgccgttctaccgactgaactacagaggaatcgtgtggagtggtatcttagcggcgaaaaaatttttgtcaaacatcaattcaactgcagcgtcacgcctgccgcatctatcaacaatttgtcgtatttgccgacaatttaccaggaaaaatactttgcaggattagcatttctcaatcatcatttgaaatgttgtttcaactcttctcactaaggtctcccttgaacgtcacttcagcagtacgccaggccgtagcgcgcacgtcctggtttaaaaagcgcaagagctatcgtgtgctctactggcgtgaaatcagtccccttgccgtaccgatcctgctggaaaacgcctgcgtattattgatgggcgtgctgagtactttccttgtaagctggctcggcaaagaagcaatggccggggtggggttagccgacagctttaatatggtcatcatgtcgttctttgccgcgattgatcttggcaccacggtggtagtggccttcagcctcggcaagcgcgacagaaaacgggcgagggcggctgcgcggcaatcgctggcgatcatgaccttgttctcaatcgtgctggcggcggtcattcacgcctttggtcagcagattatcgatatcgttgccggcgacgccacggttcaggttaaagcgctggccctaacctatctcgaactgaccgtgctgagctatccagcggctgccattgccttaattggtagtggcgcgcttcgcggcgcggggaccaccaaaataccgctgttgattaacggcgggatgaatattctcaatattattatcagcagtatcctgatttacggcattttctcctggccggggctcggctttgtcggcgccgggttggggctgactattgcccgctatattggcgcgttggcaaccatttgggtattgatgacaggttttaacccggcgctgcgtatttcgctgaagagttactttaagccgtttaactttgccattatctgggaggtgatgggtattggtatcccggcgagcatcgaatcggtactgtttaacggcggcaagctgctgacgcagatgtttgttgccggtatggggaccaacgtcatcgccgggaactttattgccttctcggtggcttcgttaattaacctgccgggtaacgcgctgggatcggcttctaccattattaccggtaaacggctggggaaagggcaggttggtcaggcggaacgtcaggcctggttcgtgttctggctgtcgactattattctgacgcttattgcctggggcaccgcgccgttcgctggcctgatcgcttcgttctacaccagcgaagaagacgtaaaagtggtggttaaagagttattgtggctcaatgccctgtttatgccaatttggtcgctctcctggaccttgccctgcgcctttaaaggcgcgcgcgacgtgcgttacaccatgtgggtgtcgatgctgggtatgtggggctgccgggtggtagctggctatacgctggggatcatgctgggcatgggcgtcatcggcgtctggctgggtatggtgctcgactgggcggtgcgtggcttgttgttctatcgccggatgatcaccgggcgttggttgtggaagtacccgcgattaaaggctcggctggaagaaaagtcatgaatatactggataagtgttactttttagacgaagtgaagaataaatcggcaaacgaacaccattataaaaaacatctttgacatggctgagcgtggtcgctaatattcgccccgttcacacgattcctctgtagttcagtcggtagaacggcggactgttaatccgtatgtcactggttcgagtccagtcagaggagccaaattcagtacttcatgaagtcacgcttcgtgaagtcatcaaaaagcctgatgatgctaatatatcatcaggcttttttgttttactggtcagatggggtcagcctagggtattgagacaaaccacatagtcaggtttgtctcagcaggggattagggttttagtaaccgggtaaccagcgcggcaactttatcgttgtggctatgggcgatattaaagcgcatatagcgtagcccttctgctttttgacaaaacagcgtacctggcgccagagccagaccctgcgctaatgctctttcagccagcgtttcactatcgatatgttcaggcaattcagcccataaaaacaacccgtaagaatggacgaccgggaaacgacaacctgcttcctgaagccagctttttacccgcgaggagacgtcactcaaattaccaataagccggcgctgatggcgattatagctaccgtcacggaagaattgatgtaatgtctgctcggtaaattcacaggtgacgccgccagtctgctgttttagctgtactaatttttcagccagcaatgggttcgttgcaatataggcaacccgcatattggcgctcagcaattttgagaagccggatatataactggcattagtgagcccggcaagcgccgacattggcttggttgccggttccatcaggtcatgatacaggtcatcttcaatgagatgacaatcgtagcggtttaatacggtgattaaagcaaacatctcttccagactataactttgcccggtggggttgtgcattagtccggaggtgagataagccctgggccgggactcttttaataaggtttcaagctcatcaatatcaacccctgtatggccgcgagggataaagacaacattggcctgatgctgactcagactggcgcgaaaattgaaatagcaagggtcgtcaatcagcacggtatcgccaggtttgatcagaatacggaacagcatgtcgatggcattcatggtgctattcgccataataatctgctcaaccggtacgctaattcccgcctcattcattttcatctgcagtgtttttctcaatggcaggtatcctcgtggattaccgtactcagaaaattttagctgcggtttgcggataatttggcgtagcgctttacggaaaaattcagtatccaaccactcttcaggcaaaaaaccgcatccaggacgaagaatatcgctactttttgcaaaagcgtgtttcagtcttgaatgcagatcggggctgactaacgaaagaggcttgtcggcgtcaatctcagtcgtttgccgtgcatggctgacaaaatatcctcttccctgaatagaggtgatcagtcctctggcacgcaagcgttccagtgcttccacaacggtaaatttactggtttcaacctggtcgcagaattccctcagggaaggtaaacgactgcccggtaataattggccgccgatgattgccgcgctgataaaatcaacaatctgggtgactttggcagtgccattcaccagttgtagttgggataagctaaaaatggggctacctctgatacttgccttgactcttcgaactgtaccggagattttacctgtaaggaaagcgaatatttcgctaaacattctatgaacagtactacactaacgcgatatatctttagcccatcaattgtggttctgaagatgagtgtatgacagcggcaaaaaataacttttatttattatttatcaaaaggttgggagcgtattccgcccagctattgttactacggatggtctctgcaattgccctgttttccctgctcgggcaggccaatgtttggttagacacgaccagtaatgccttactggcttttggttatcggtttctgttgatattgaccccattgacgctaggtttgtttggtcaacgtgcattaatagttactctgtcggtctcgctgctgggaatagtattattagcactaaatgttgcaacgggcgtcaattggctggcggtggtcctctttagctatggtgtcgccgtgctgggttatatcgtgaagaatgatgcggccagaaccccggcaggagcggctaataataaaattatgcttaatctcggcagtctgtgtgccgggttattattactctatccgcactggagtccattattattttatattgtaattgctgctttattgctcgtttgtttaccaaccgcacgccattttagtttatcaagtgacctgacggcgcagacgctactgacgaagaactttgccaaatctggaaagttgaaatgggtattagcagggattgttactggggttaaattatttgcggtattctctatcctgccgcaggaaattctggttcatcgacagactctaccagcctggtatggcatgatgatcatctttaacagcgcaattgttgcattaatacagataccattaatggcgcttattaatcgcagtggcgataaagcaatgctgatgtcgatagtgattatacttcttggcttgatcgttttggcagtacctggcattttccatgtttataatttttggggagcagcggtatggctaacaatactatcaattgctgaatgtgcattgagttatattgactattgtgcagcgcaagaaaattctctgttaataaaagagttgtccgtcagtcttggcgcaggattaacggttctggttatgcgttattttccggtggcgattaacacagaagtgctttctttaatttctattgtcgcgttattactttggctgtggaaatataagtactcatcaaataaattctataaggaaaatatagatgccgtcagtgatgtttgtgaaaagtgaaactgaattcactttcagggatgtggtgagccttttagaatgcagggagaacatgaggtttggttgtaaaactggaaactgtgggttgtgtcgagtcaaggtattatcagggatggagaatatcaccggcaagactttaaaagagaaacgtttattcaaattgcttggtatagaagatcaaacggtgcggctggcgtgccagtgcaaaatcaggatgtctcctcgcgcggcacaatttcttactcaccgacaacctcgccattgagtggtgttgtctttggcgagcaaacgaaaatcgcaagagtcattgagtcaatttttaatacctgcacagtggaagccttatcatgaatacgccatgctttattgtcgttggatataataacgtcagaatttatgatgttgctaaaattcgtgttgaggcacaaaaatattttgacgccaaagttgtattaattactgagaaaaaaacagcaagcgatgagcaatttgctgatctggtgattgaaacaacgcttgaagttacacaactcccggcctcagcggatgtcgttcatcaatatctggcaaccgaatcactttctcccatcggtattttaccattttccgatcgaggtgttcctttgggggcgctgctggcgcaaaagaacagactacccggcgcgctgccagaacaagcaaaagcagggctggataagcaaatattccgtcaactggatgccagggcttcattccatcccgccggttatcggacggtaaccagccagccggtaacatcattgaatgaacttaaagatctggtcgattcgttaggcggtaaggcgtttatcaagccagcgaaggagggcaatagccgcgggtgccaggtgattgagtgtattgagcaatgcgagtctatctgggcttcactggcgccttatcgcgaagcagggatcctggtggaatctcttatcgaaaatgcgaaagaatttagttgggatagtgtggcgggtaagcagtggatcacggaaaagcatactactgaaggccactaccgtgcggagtatcaacaggtggtgcctgcctgtttgaccccggcggatgaaatactgctgcgttctgcaggcgaacatatgcgtgaactggtgtcgccgtcgaatggcgcctggcataacgaaatatttttacttcccggcgcgacggccgctgttgaaaccaatatgcgccctgccggtatgcatatttgggatctggcgatgttgagctttgaaaatttcaatccatggctgctgtggctacgttgggctgcggagggtaaatatacggctgagccgctcaaacagaactattactctggtatccgcatgcttcgggcccgcgtatcaggaaccttgcaggcattaccagatgttgagcaattggcattgcaggcgggtattacgcttcatgaagccagcttttcagccaaaatcggcgacatccttaatggcgaaattaagacgaatgccgattttattggccatatcattttgcgcgatagtagtcatgagcagttactcaattcattagagacgctggcgacggctattgagtcttccgctgaaattagctaagcgcgtggagcacaaatgaaatcctcttttatctggcacgataaacgtagtctgaactatttgctgtcgttgttcatattcagcctcggcagctttattatcaatccttactatgccatttatgtgtcagataatttaggttatggcgtggcatttgccggtgtgttggtctcaattaaagtcatttcacagcgcgttttcgctttatttggcggcagcatggctgatatttttcctgccgtttatgttgcccttgccgtggtgggggtgcgcgcgctgtcgtttgcgcttctggctctgaatgcgaatcatgagatcctgctcgtttctgcggtgatgaatggtattggcggggcgccggtcgctgatagtcgagctctcggctagcctgtttaatccagcgttattccccgttttgccctgcaatttttctttatgtatttttactctcatattgagtacctgttgccaatatttatcacccaccagtatagcgagtattttgttagcgtggttttcttcgttaataccttgttcgttattttcgcacagacggtatttagccgtatttttaatgaattacgtgccggtattgcatggggcgcgatggcgctatttcactggtggcggctggcgggttatttgcggccaacgccatcaacagcgtcatactcgagcactttaattttgcagctgtctggctggtgaattcggtaattgccgcagccctggggggcttctcattgtatcgatattatttatcccgaacgctggcttattctcgctagatttgcggtatacccgctttgcatgatgccatacaaagcgggtgggcggattaacggaacggcggttcgttgaaggtacgcagcttgcgggagtgcatgtggtcgccctcggcgcgcagcagatcgatggcgcggatccctatctgcagatgctcggaaatcgccccttcgtagaagcggttcgcttgtcccggtagcttaatctcgccatgcagcggcttatcggagacgcacaggagcgtaccgtaaggtacgcggaaacggtagccctgcgcggcgatggtggcgctttccatatcgatggctaccgcccggctgaggttaaagcgcagcgccgaggcggaataacgcaattcccagttgcgatcatcggtggtcaccaccgtaccggtacgcagacgttgtttgacctcttcccccggcatgccgctaacctgtttagtggcgtcatacagcgcgcgctgcacttcggcgatactcgggatgggaatatccggcggcagcaccgcatccagtacgtggtcgtcacgtaaataggcatgcgccagtacatagtcgcctatcgactggctctcacgcagaccgccacagtgaccaatcatcagccagacgtcagggcgcagcaccgcgagatgatcgcaaatatttttggcattggccgggccgacgccgatgttgatcaatgtaatgccctgaccgtcgttagtgatcaggtgccaggccggcatctggtgttttttccatgccagatcggaaatcgcctcttccggtgcctccgtgtcggcggtgatccaaatcccgcccgcacaggagagggcaatgtacgggctatccggatcgaggatctggctacagccccaactgacgaattcatcgacgtaacgcgtgtagttggtaaacaagacatacggctggaagtgttcaaccggcgtgccggtgtagtgcttcaggcgtgccagtgaaaaatcgacgcggcgggcgtcaaaatgcgacagcggataatactcggtggcgtggaacagaccatcggcggtttcatcgccaatttgtgacagttcggtggtcggaaaataacgcgttaatccggcgctcatcgagcgatccagcgtcagcgcagagccatcaatcacgtaagggaagggaatttcgtgctgcgaattgccgacgctaatatgcgcgccgtaatcctgatacagcagagttaattgttccagcagataagcgcgaaagagttttggattggtaatggtggtggtgtagcagcctgcatgggtgaatcgcccccaggctcgggtttttaaggctttgtgctcggcgccatcccacgagacagacaattgaggatagacgaataagccttcagcacgggctatttcatcaggaagaatattgtggtgaatgtactcgccaatggccttacgcaacgcgttaaccgctctttcatactgcgcttccaactgggaaagcgcctgctccggggtcagactgacggccttctggttcatcattcgctccttgtttcaggtctgctgatactgacgatagtatgctacagcgtgaaaatggcgaaggaaaattactgtcccggataaatattcaaactcgttgataataaaagcttagccacccaggatcaggctgtctgtgcccaacgttcggcgctaaaattacttgcgcttatcactcttaatgtcgccgcgccgttattgttgatgtaataaagcgcattagggccaggcgttaacttatcgccttcctgcagtctgcatcggctttcgatttcagcaatcaccacgaactgaccgctctgtagaaccacgcaagtcgttgctgtagaggaatttttccgtactttctttacccaccactccatgttttcacccaggcttgttacactcagaatgataattgccgtgttatcgttttaaagacaactgaaactacccattggtttaatttacgtttagctgacgttgttaaatcttaactcggcgatgcagcgggacaggcaaataacacctatggctttgatgcgatttaacaagattctgaatcaatctggattaaggatagtctcgctggcgaaaaaagcgctggtcgccgccgctattgttgtggtggtgtttttcatcggacgaatctatgaatcggaacgcggccccgcgttgcagcgctggcatacctggtctggggatgagatgaccgccggtgaaatcgaccgcgccagctttgccagctatctcaagcgggaagatgaaatatttgctgatttgcggcgtgaggtcagtgaccagctatcagccgctgacaaaacgccgctaaatcgcttttatcgcgacagcctggtctacccacaacgctttacgccagactggaatcgctcctttatcctactgccatccggcaaaccgcgtggggcggtggtgttgctgcatggattaaccgactctccctacagcgtgcgctatctggcggaagagtatcaacggcaaggttttgtcgcggtggcgccgcgcttacccggccacggtaccgcgcctggcgcattaacccacgttgattggcaacagtggctggcgacaactcgcctggcggtacgagaagcgacgcgacttgccggtggggatgtgccgctgcatctggtgggatattctaacggcggcgcgctggcgttgaagtatgcgcttgatgaactgaccgataaatcgctggtcaggccgcagcagattattctactttcgccgatgattggcgtcaccgctttcgcccgtttcgccgggctggctggcctgccttcggtgtttcccgcctttgcgcgcgcggcgtggctaaacgtcattccggagtttaacccttataagtacaattcatttccggtaaaggcagcgcgccagtcgtggctgctgacccaggccttacaaaaacagattatccaggcggcgcagagccagcggctaacttctatcgcgccggtgttaacctttcagtcggtgattgattctacggtcagtactcgagcagtggttgattcgttataccgctatttgccggacaacggcagcgaactggtgattttcgatactaatcaggcggcgaacctgcgggcgctgtttcgcccggcgacttattcggcggtgaataccttgttacctccggcgccgcgtccgtactccacgacgatcgtgacgaatgcgactcagcacaccctcgataccgtcgcgcgcctgacgctggcggggcaaaccgccgagagaacccaggcgctgcatttgtcctggccgcaggatatgtactcgctttcgcatatcgcggtgccgttccccatcgccgattcgctgtatggccgcgagccgacggagaaaaaccttagcggtattagtcttggcaccatttcgctacgcggcgagaccgcgacgctgagcgtcggtcttgatacgttaatgcgcgccacctctaacccgtttttcccctacctgctgcagcggattgatcagcgtctaccgttgggctcagaacaccaggatgtgcaataccgtccgcagcgcaataccgatgagggcggcaggggcgacgaagcggaaaagacgcacaaatcttgagctgacgccaaggaaaatgccgatgccgggtaggtcgaaagtctggatgagcagccccgcggaggcgttaatctggctgagcgtcacttttccctgctgcgccagctcggagataaccccaaaataggcggtaccgcccgccacacatttcaccagcgcgggcagaacgaagttttccgggatatgtagccattgcagcagcggcatcagcacgcgctgcagcatttcgatgacgccagccgcctgcatcaggccgacgatggtcaaagataaaatcagcatcggcacggcgccaagcgccaggcggatagcgtcggcgccggcgctattgatcaccgcaatcagcccgtgattattttgttcgctttccgggagtacttctgcccggctgctctcgacaatggataacttacgcccggtggcgtaccagcagaccgctgcggcgcagagtccaccgacaatagaaatggtgattgcggccagccagtgcaggccaaacggcgttaaggggtagaaaacgttgccctggcccatggcgaacaccatcgccagggtggcggccatttgtcggtcggaaacaccacgtttatccataatcgccagcgtggcgagcggggcggcaaaactcacaaaatttatctgaatcagcgcgaaggcgctcatgccggtcaacccaaagggttttagcagcggcgccagccagcgcacgatgatgtcgagaattccgcggacttcgagatatttcattatgatcagcatgacgaccataatgggtaataaggtataaagcgctacgtcgacggaggatttccccgctgacataatgatgccgatgacatccatttatctatcactgtatgcaggtcaaatagttagcgccatcataatcccgaaggggcgaaatgaacagctagcacaggtaggtaagaacggtgccttcactgaagtgatattcgccgctgaacgggctacctgcggcaaaggcgtcgctgagcgttttattgaggcgtaacgtgaaacgctgttttgccgggtcgactgcgactatggcggcggcatcaaaatcaaacatctgctgtacgcgcggatatagcgctttgaacaggctctctttggctgagaaagccagcagcagtgcccactccatatccagcccacaacaggaaagcagcgcctgttccgttttcgagacaaacatatcggcgctttccagcatgacccccggttgtagatgctcgatatcgaccccgggataccggccgtcggcctctgcggcaaccaccgcgatggctatatcttcgctgtgcgagacgcttcctcgccagcctgccggccaaactggcgcgcgatcggcggcgcttaacaccggctctaagcagccggcttgtcgaagcaaatagtgcgcgcagatgcgcccggccagatattcggctttacgttttacgacggcgcccgcaagagaagaagggaacgggacggcgtattggttgaaaagtgcgtcctgtaattgtgtcctggcgaaacgtacccgacaaaattttaacgccgggtcagcgcgaagatagccgaactcggcatgctgaataaaaggtaaatcgcggaaggtgtcggtaacgataaacatgcaggatcatctggtgaaacgaacgatgacgctaccttaacgcaagtgataatcaaagcagaaggtgtataaagcaaataaaagcaaaaagcctgctcgaaagcaggcttttctaaatttggctcctctgactggactcgaaccagtgacatacggattaacagtccgccgttctaccgactgaactacagaggaatcgtgtgaacggggcgcatattatcgatgacttagggtgttgtcaaaggctgaatcgccataaagcgttcgactgctgactatttcaacaatcaaaacccttttagagtaaaccccggcggaaacgcaccaaaatggtgcgtttatacccctaatggggcatatcatgcgctcatggaagccagcagtattatcactaacccttattttaccgcgccagcagggcggtgagcggctacgtaaaacctggcaagcatcttgcaaaatccctgtaacttaatggccagtagtggcattcccttacaggaggcaaaatgaacttaagacgactgaagtattttgtgaaaatcgtcgatatcggcagtctgacccaggccgctgaagtcttgcatatcgcacaaccggcgctgagtcagcaggtagcgaccctggaaggtgaactggagcagaaactgctgatccgcaccaaacgaggcgttacgccaaccgaagcggggaaaattctctatacccacgcgcgaaccattttgcgtcagtgtgaacaggcgcatctggcggtacataatgtgggccagacgctgagcgggcaggtggcgattggccttgcgccgggaacggcggcttcggcgatcaccatgccgttgctgcagaccgtgcgtaatgagcttcccgaggtcaacgtctatctgcaggaatgtagcggcagcgttttaaatgacaagctgcttggcggccaactggatatggcggtgttgtacgaacgttcgccggtagcgggagtggtcagccagccgttgctaaaagaggatttgtatctggtcggcacgcaaaactgcccgggacaaagcgttgatctctctgcggtggcggagatgagtctgtttttaccgcgtgactatagcgctgtctgtgccagggtgacggaagcctttaccttacgccgcctgtcggcaaaagtgatcggcgagatcgaatccatcactacattaactgccgctatcgccagtggaatgggcgttaccgtactgccggaatcggcggcgcgttcgctgtgtgctacggcaaatggctggatggcgcgcatcagcacgccgtcgatgagcctgtcgctctcactgaatacctcggcgcgcggcggtttatctcctcaggctcaggcggtcaaagatatcctgctgtcgctggtcagccgtccttcgttggagaatcgtgaattacagctggtcagttaggttatattcttttaaggaataagttgctggtttttattatttgtttgccgggtaaacagactttaacaatagacatcatgttatgtctgaagacctgggggaaaaggtgaatttccagcaactaaaaattattcgcgaggcggcccgtcgggattacaacctgacggaagtcgctaatatgctgtacacctcgcaatctggcgtcagccgccatattcgtgagctggaagaagagctggggatagaaatctttatccgccgcggtaagcgtcttctggggatgaccgaacccggtaaagcgctgctttccattgccgaaaggatcctcaacgaggccagcaatgttcgccggctggccgatctttttaccaatgacgcttcaggcgtattaactattgccaccacgcatactcaggcgcgttatagcctaccgccggtaattaaagcttttcgcgaacttttccccgaggtgcgtttggaactggtgcaagggacgccgcaggaaatcgaggcgttgttgcacaacggcggggcggatattggtatcgccagcgagcgcttaagtaacgacccgacgctggtggcattcccctggtttcgctggcaccacagtctgttagtgccaaaagatcatccactgattgaggttgcgccgctcacgctcgaggctattgcgcgctggccgttaattacctaccgtcaggggatcaccgggcgctcgcgtattgatgaagctttcacccgtaaagggctgatgccggatatcgtcctcagcgctcaggattccgatgtgatcaaaacctacgtggagctgggcttgggcgtggggttggtggcggaacaatccggcgatgctcgcgaagcggatacctttacccggctggaaacacgccatctctttgatgccaataccgtttggttggggctcaaacgcggtcagttacaacgtaactacgtctggcgtttcattgaactgtgcaatgctggactatcgctggatgagattaagcggcaggcgatggagccggaggaagtggcgatcgattatcaaatctgagtgctgccagcgggcaagcgggaggcgacaaagcagctataattcattcacgtgagtcgcgactgaggaagggaaaatgatggtgcggcgtatgaagttgctttgctctctggtgatgatgttggccagccacagcgcattggcggtaagttatccgttgccgccggaagggagtcgtctggttggcagcccgatgaaaattaacgtgcccgagcgtaatacccagccgctggaaacctttgccgcgcagtacgggcaggggctgagcaatatgctggaggctaaccccggcgtcgatgtctatctgcccaaatcgggaagctcgttgattatcccacagcaattgatcctgcctgctaccgtacgtagcggtatcgtgataaacgtcgccgagatgcggctttattattatccgcctgagggcactaccgtcgaggtcttaccgatcggtatcggtcaggcggggcgcgagacgccgcgtaattgggtgacggcggtggaacgtaagcaggaagggcctacctgggtgccgacggcgaatacccgtcgcgagtatgccaaagaaggtaaaaccctgccggcgatggtgcccgccgggccagataatccgatggggctgtatgctatctatattggcaggttgtatgccattcatggaacgaatgccaattttggcattggcctgcgggtgagccagggctgtattcgcctgcgcaacgatgacatcaaatacctgttcgataatgtgcccgttggcacgcgagtacagattatcgatcagccggtaaaatacacgactgaaccggacggtagccgctggctggaagtgcatgaaccgttatcgcgtaatcgcgctgaatttcagtcagaccgtaaagtaccgctgccgtataccccggcaatccgtgagtttgtacagggcgcgggcgtgaatgtcgggcgcgcggattcagcgttacagaggcgctccgggatgccggtgaatattagtcgttcagcggtggaaagcagtttttaactggcgtagatgttaaaaagcaaaaatcctgctcgaaagcaggctttttaaatttggctcctctgactggactcgaaccagtgacatacggattaacagtccgccgttctaccgactgaactacagaggaatcgtgtgaacgaggcgcatagtaatggcctcgcattttagtgtcaacactaaatttaaccagctgattcaattggcgatatttagttcaaagcgggcttttaatgaacaacgcgcgcgtcgtcttcatccagtagatcgttttcccgtaaacgctgtagcggatcctgacgatagaactggcagaaccgctgccatagcgccgggaagcgaggagcgaatagctccggtgcgctaaagaaatattctgagagcaccgcaaagcactcagccggatcggttgccgcataggcatcaatgctggcggcgctttcgccgaccagatcgatttcatcctgaatgttgttcatcggtgcatgcaggtcgtgttcccaaccagcgacttcacgcaagggaataaaagggacgccgctggcacgatcgccgttacgtgaatccagtttgtgcgcgacctcgtgcaccaccaggttaaaacctgaagcatcgaaagagtcctgaatatctaaccagttaaggataatgggaccctgctgccagctttgcccggattgcacaacgcgttgattatgcaccaggccgatgtcatcttcccattcgtcatcgacgacgaagggcgctgggtagatcaggacttcatggaagccatctaaccactcaaggccaagctccagcaccggcagacaaaagagtagggcgatacgcgcgctatgtaatggggttaactcaaatccctgtaacggcaccagacgtttttgctgtaaaaaacgtgctgccatttggcacagttgttgctgttcctgatgagtgaggtttgctaaaaccggaatggcaaccgcttgttcccacgggatttcgccattgcctgtctgttcttctgctttccacggccatttaaacatcatatcgctcgcaaagtcgtcacttgaactcaatttaagggactggaactattaaaatgccaaagaacctggcattatagcaacctcaacagcggagagatgccggagcggctgaacggaccggtctcgaaaaccggagtaggggcaactctaccgggggttcaaatccccctctctccgccactattcaatcacttacgcttatccttttcagtgatgcatatcccgctgagacaatccctttacaaaaaagcatagcgctgaagcagacaagggcgccaaagaatcttctcattttttggctcagaccaggactaaatttcagcgtttccgctttcgtgcgctagcaagtatcccttccgctgctgaagtgctattgagccacttccctggcgaaatttaaatgaattcagtgaattgatgccgacgtcgcgcgaggcagtattggctgaccgttaaaataaaaaagcctgcgcgtggcaggctttggtcatgaggggatcttagaactggtagaccagacccagcgcgacaacgtcatcggtggcgatgccgtttgcgcggtagaagtagtcatcttcgtccagcaggttgattttgtaatcaacataggtggacatgtttttgttgaagtagtaagtcatacccacatcaacgtatttaaccaggtctttgtcgccgctgttgtacaggtctttacctttagactgcagatatgcaacggatgggcgcagcggtaaaccgtaatcatcgaactgatactgggctacgacttcgaagttctgcgtcttgttggcaataccgccgccgaggtagctggtggatttaccgaaggatgtcatgttgcgggtttccgcgtacatcgccgcgaggtagatgttgttagcatcgtatttcgcgcccacggtccaggcatcggctttatcgccaccggcgtatgcgctgctggcagatgcggccacctgattgtgggtacgatcggaagaagcatatgccgcgccgaagctgatgcccatgccaaaatcgtaggaagtagagataccgaaaccgtcgccattttcacgcgccagtttacgatcgccaccgttattggtgccttcgccagaacccgcgttttcgttattaccctgatactgcagggcaaagttcagaccatctaccaggccgaagaaatcgctgttgcggtaggtcgccacgccgttggtacggccgagcatgaagacgtcagtttgggtgtaggtatcgccgccgaattccggcagcacatcggtccaggcttcaacatcataaataacaccgtagttgcggccgtagtccagtgaaccgtaatcagcaaatttcagacccgcgaaacccagacgggtccaggagttagcgccttcaccttcagtggtgttagcctgaatattgtattcccactggccgtagccggtcagctgatcgttgatctgcgtttcgcctttcaggccgaaacgcacgtaggtttggtcgccatcttcagaagcatcgtcagagaaatagtgcaggccatcaacttttccgtagaggtccagtttattgccgtttttattataaatttccgcagagtgcgccgcgcctgctgctaataacgctggcagcataatagccaatacttttcttttcattatgtattccctttaatcataattaatatgaattgtctaattccctgtggaatgacaaatcgatactagccgcttaagttcatttttaattaaataaaaaatgtaataaaagtatattaaaatatttcaaaatatttattttatattcaatatatgtattttctattctttgggtaattagtatttctgaggtttattggtgttttatttttattgttgatattaaactgtttttaatttcctacaataatgatatgcgcattgtaaatgacatagcaacatcatcagttataaagtaataaattattatttgaaataattttgtttgataacgaacatcgctgaatttcagcaaatcgtcttatttaaaagcatgaacacagccgtaatatataggggagtaccgctcctgcgttcacggatgaccaaaagcgctcagtactacactcatgcttccagataagcatgataattgtataatgtgacgagcatcacaattgtgtggtcgaagatgatgcgttgtggttgatgtatggagaaggatttaatggacacgaaagcgaaacgggggaccgttggaaagctggcgttatgggctttttacgctttttgcgcttactttgtgtgggcgatggtacggtactggtggatagtggggcggattcaaagcgttcccggcgccagcattgatggtgaatggggatcaacggcgggcaaatggattggcgcgctgctgggttttttggtgctgggggctgtggggttaatccttggggcgatagcctggtacacgcgtccccctattcaggtacatgaacaacgcgattaaagttgctatgctcgtggctagtcccaggcatcaggaaacgctcatgttattagctgaatggcaacaacgatttgaaaactggttaaatacgcatcatgcacaggaagatgcggcgcatgacatttcgcactttcgccgcgtctggagtaccgcgcagcaactggtcggcgagagtggcgctgacgagttggttatcctgacggcctgctactttcacgatattgtcagcctggctaaaaaccatcctcaacgtcatcactcttcacggatggcggcgcagaaaacgcggtctatcctgcaaagcgctttccccgactttccagccgaccgttatcctgctgttatgcatgccattgaagcgcatagctttagtgcggctatactgccacaaagcgtagaggcaaaaattgtccaggatgcagatcgtctggaagctttaggcgcaattggcctggcgcgtgtctttgctgtttccggcgcgctaaacacgattttgtttgatgctaacgacccctttgctgaccagcgcgatcttgatgacaagaaatatgctctcgaccatttccagagcaaattgctccgtctgcctgagaccatgcaaacggagcagggaagagctttggcgtcgcataacgctcaatttctggtgcaatttatggcgaagctgagcgccgaactgcgtggcgacccgttgtcgttggatgaagcggttttgcgccgctttgcgcctgcggtttaaatccgttgcgactatttgtggtactctctgcaaaaattgtccgtgctggttgaggttatgccgcaaaatttatcccaagaaaacctcctgtctttaccgtcaggggaacacgcgcaggcgttattgcgccagctgatgacgatatatgatgtcaaaaccctggtcgcacagctggtcgcggttggcgaccagcactggagcccggcgatactcaaacgggtggcgacggtgagccgtgcggcaagtagattgactaacgcggagtgcgctcatctggcgagcctgttaccggctccgccgcgccatcatccagactatgcctttcgttttatcgatctcttcgccggcatcggcggcattcgtcacggctttgaagctattggtgggcagtgcgtatttaccagcgagtggaataaacacgccgtacgtacctataaagctaactggtattgcgatccgcaagagcacagctttaacgccgatatccgcgaaatcactctcagccagcgcgccgatatcagtgatgaagaggcggcaaagtctatccgtgaggcgatcccgcaacatgatgtactgctcgcgggcttcccctgccagcctttttccctcgccggagtatccaagaaaaatgccatggggcgcgctcatggttttgcctgtgaaactcagggaacgctgttttttgatgtcgtcagaattattgccgcccgccgtccgccgatctttgtgctggaaaacgtcaagaatctgaagagccacgatcaaggaagaaccttccgtattatcatgcagacgctggatgagctaggctatgaggtggcggatgccgatcatgcgggcgtcgatgatccaaaagttatcgatgggcgtcatttcttaccccaacaccgtgagcgtatcgtgctggtgggtttccgtcgcgatttacaattgcatgaaggatttacgctgcgcgatatcgccagcctgtacccgccgcagcggccgacctttggcgagttattggatcccaccgtcgatgctaaattcatcctgacgccggttttatggaagtacctctaccgttacgcgcgtaaacaccaggcgcgtggcaacggttttggctacggtctggtcgacccgaccaatccaggcagcgttgcgcgaacgctttcggcgcgctactacaaagatggcgctgagatcctggtcgatcgaggttgggataagccattgggcgaaaagcactttgacgatccacaaaatcaacagcgccgcccgcggcgtttaacgccgcgtgaatgcgcacggttgatggggttcgaagccccgggagaataccgttttcgtattccggtttccgatacccaggcctatcgccagttcggcaactcggtgattgttccggtgtttgccgcggtagcgaagctgctggcaccgcgaatttccgaggcagtaaagcggcgcgttgcaggagatagcgatggcggacgttcatgataaggccacacgtagtaaaaatatgcgcgctatcgcgacccgcgatacggcaattgagaagcggctggcggcgctgctaacgcaggccggattcacttttcgcgttcaggaggcatcgctaccggggcggcctgattttctgctgtctgactaccgctgcgttattttcacccatggctgcttttggcatcatcatcactgttatctgtttaaagtaccggcgacccgtaccgatttctggctgaaaaagattggcgctaacgtgcagcgcgatcgccgcgacctggcgatgttgttagcacaaggttggcgggtgcttattgtctgggagtgcgcgctccgcgggcggcagaaattaagcgatgatgctttatgcgatcgtctggaggagtggatctgcggcggtggaaattgcgcgcagatcgacactcagggcattggttttatcgatccgattgacaaggcgtaacggtggagcgggcagggaagagatatttacccagcgtcaccaacacgaccgcgaaaataatcaccgccagcgccagccattcgataaatgagagactttcgccgccaaatccggtccccagcagcacggcgacaaccggattgacataggcatagctggtagcaaccgccggcgttacgttacgtatcagatacatataggcgttgatggcgataagcgagccaaaaatggccagatacgcaacggcaaatattccagaccaggagggcatttgagcgagtttttcgcctgagaaccaggatgctgcggaaagcaccatccctgccgccagcatttcaatcgcacccgccatcatcccggttggtaattcaatacgggaaccgtaaaccgagccaaacgcccagctcagggaaccgattagaatcagcaatgcgccccaggggttgccgctgaggttgccgccgctattgagcatcactattcccgccaggccaatcgcgataccgaaccattccagcttgcgcgtggcaatgccaaaaaaacggctgaaacagagcgtaaacagcggtacggtggcgaccatcaccgctgcgatgcctgatggtacatgctgatgttctgcaagagtgacgaagccattaccgacggcaagcaacagaatgcctatcagtgccgcattaagtagcggccggcgggccgggagtttatggccggtggccagcaaatagatgagcaacacgccgccggcagagagaaagcggatcccggccatcatcaacggcggccagctggcaacgccaatagcgatagcaaaataggttgaaccccaaatgatatacagcgcaaacagcgcgccgataaggggtaacagctgacgggtagacatacttcctcgcgacgaaaagagatagaaagggaacatatagttaacgtgaaaactaaggtgctggcgagcgctttcaatgtggtttttttgttatatttttgttgactaatgacatctctgggcgagagggcacttttgcctcatactctatgtttcataaacagaaattgaaggaagcacattttggcgggaagtagtcttttaaccttattggacgatattgccacgctgctggacgatatctccgtcatgggaaaactggcggccaagaaaacggctggcgtactgggcgatgatctttctctcaatgcgcagcaggtcacaggcgtaagagctaaccgcgagctcccggtggtatggggagtggcaaaaggctcgttcctgaataaagtgattctggtgccgctggcgttactcatcagcgcctttattccctgggccattacgccgctattgatgctgggcggcgcatttctctgctttgaaggctttgaaaaagtgctgcataacctgcacgcgcgcaagaataaggaggatccgaaattgcgccagcagcggctggaaacgcttgcagcccaggatccgcaggcctttgagcgcgataaagtaaaaggggcgatccgtaccgactttatcttatcagccgaaatcgtcgcgattaccctgggtattgtagctgatgcgccattgcttaatcagatcctgattttatccggcatcgccattctcgtgaccgttggggtttatggcctggtgggcgtcattgttaagctcgatgacatgggatattggctggcggagaagaaaaacgcactggcgcagtgggttggaaaagcgctcctggccatcgcgccgcgattgatgaaaattctgactttcgtcggtaccctggcgatgtttctggttggcggcggtatcgtggttcacggcgtagcgccgctgcatcatttcatcgagaattttgcccatgggctaagcggaatgctggcatccacattgcctgtggccgctaatctggtgctaggatttatcattggcgctatcgtctttggagtcgttaaagctatcaccgcgttacgcggtaaagcgaaataaatccctgcgccggctacgcaaaatgggccggggtcgtctaaggtgaaacagtttcttcctgataccggaggcaaaaatggtcttgttggtcagtgatgaagtcagacgaaaaaacggcgggccgcggatggtggtcaccggcattgccgacgatatggtcgagtgccggtggtatgacggacaggtcgtacagcgtgaagccttccgtgaagatgagttggtccgcggcgaagggcaacattcgcagcataattagatgtgcagcgcccgctggtgcgggcgcttttaatattgattacgttcggacaaggagcgttgatgttgttggtttctttgaccgtactgcgagtaaataatggataagccgctctggccaaaaaagtttcatcgcctcttcaatccggggcgagtggtcaatatctgtttcatcgtggtgctgttcttttcaacgttgctcatctggcgagaaatccgcgtactggaagaagcctacgtcgccaaccaacgtaataatcttgagaacgtggcccatgaaatggatgggctgttgcaatttaatctcaatcgtctgctcttttttcgcaacagcatgcaatcagcactggagaatccgctggatttcgccattctgcgccgggccgaacaggagtacatcagtaaacgtcatgatcccatctggtcagtcgagctaaacaaccggcgtactctgacggtatacggggtttcagattcttttgtcgacgctgatgatctgttgtcgcgtaataatcctcaggccagcaatgaactgatggctacccttgagctgggctatcttctgcgtttgaccaataacaacagaattttcagcgagcgcatgtcctacgtttctcgcagcgggttttataccactaccgatgccccgcgcagttccagccaggtgctggcgcagttctcgcgagatacggggtcagcatggtttatgcggcaaacccagcgtgataatccagggcgagggatcctctggcaaacgactcaacaagaagacgggtatacgcaaccgcaggtggttacggcctcgatccctcttgattatgagcactactggctgggggtgctggcgatggatttttccatccgcgacctgcagaattttctggtcagtgcggtaaaaggagggcaaatgggcgagtatcaactgtatgacaagcagctcaatttgctcgcctcttcggcgccggatgatgtcctgacgccgctctcgccaaaggaacaagaacaacttcgttatgcgttgaccaatgataaccatggcggcatacgtcagttaactcgctatatcagttgggaaaagatccgcaactttgacggcgtactgttgcatattcatactttgaaggaaggagtgcgtggtgatttcgggacgatttccatcgcactgaccctgatgtggttaatgtttaccctcatgttgattgtgtcgtggggggttattcgccgtatggtcatcaacatgagcgtgttgcaggcgtcccttgagtggcaggcctggcatgacgcattaacgcggctgctaaatcgcggcgctctgtttgaacgggcgatcgcggcggcccgaagctgccggcggaataatcaaccgatatccgtcatacagctggatctggattattttaaaggcatcaatgataaacatggtcaccaggcaggggaccgtgttttgacgttggttggcagtactattatgggacagattcgcgagcaggatattgccggacgcgttggtggtgaagagttctgtatcgttctacccaatacccaactgccgcaagcgcgtgcgattgctgagcgtattcgtctgcgtatccatagccgggagatattgttgcacaatagcgttagtttgcggatcagcgcctcgctggggatcagtagtagcgaaacatcagatgagtttaactttgaggagctgcagtcgattgccgatcatcgcctgtatctggcaaagcagaatggacgtaatcgggtttgttcggctgggtagggcctggtaatgtgaggatgctcacctttattgccgtgttgttgctcttcggtatgggaaaattcttaaaaaacgtatgacacaagcataccgttcgtaaaagaacgataacaggcaagccttgtcgcgcctgggttattaaataggttgtacatataagccgcatttctcaataattctcatcatgaatacttcttgtcatgcaaaataattgaggataatgtcttccatgcatcggatttcccggtgtaacgaattttcaagtgcttcttgcattagcaagtttgctcccgactcctgcgagtcgggatttttttcacctgagcttagcgattggcttcagtaacgctaaagtcatgaatatcaagctcaaaggcttcggccagctcgcgccatgtgtgttcatcacggccatcgatactgacatgatgcggatcatcttcactacgatgtacttcgctttcgctaatctcattgatcgccgccagcagggcatcgacattaacgtcaatcccgtcggtattcatcacaccgtggtctttagcggatttcatcatcactacctcgctcggctctgaaagggcctctttaagtatagacggtctataaaaacgccagttgcgctggctgaacgctgcgtgaagtcagcttttgttctacactggctcaaaacgagaggaggcgagttatgcaggtaaacgatcgtgtcacggtaaagaccgacggtggcccacgtcgatcgggggtagtactggcaattgagtcgtttagtgaaggaaccatgtatcttgtagcgctggaagattacccgctggggatctggtttttcaatgaagtggggcacccggacggcatctttgttgagaaagcagagtaggccccattcagaaactggcggtaatcgccgccagtttgccatcagcgcatattgacgtaaatgccggaagtaatgttttcggccaaccgaacaatgtggtaaatcacctgtttattgtgtgtctggatttttttcttaatattacctttatgtgacgaaacggtttttgctttgatattcatctgcctggaaatatgtgaagtagcgtggccggccatccacatttgcagcatattcgattcggcctgactgagcgatagagtgggaatgcgggtgcgtaattggtttagattattggcgctatcggtctgcagataattacccagtatgttatcaaggtctttcggcgtaagggattttgagctgataagtaaattcttgcgtacaagtaaatagtgatcaaaatggatgttggccagcgacataaaaataacaaatagagtatcggggtaggtggtaatgatgtcgcggataagttgattgctctcttcgtgatgtataaaacagtcttcgttgagaaacacaaccgccggacgcagcgattcgcagcgctctttcaaactctgtgcgctacgcacctcaatgatatcgcgcttctttattccccggcttgccagatatccggttaaacctagccgggtatagctgcacaaatccatgataatcgttgacatgacccatcctcaatcaacacgtaacgataattcatctggcccaggccgtgtgatgaagtccatttttgtaacacctgactttatgcggaaagcattagccaagctaaactattcgctaataatactcataatttgccaggaatattctcaaagtaaagccatagaaaaagaataaacagaccctgacagtaataatgcccggtgtcgcggcatgtcgtcgccagaattgtaatttattttcggattatccttatggaggagcagcctattaaattggcgttggctgtattctattcaaaaaatgcatttgtcattcaggtttcatacaactaataataatcggtaagaataaatgctgagattgacggcgaagctaagcaacgggagcatcgcgcaggggtggcggccttaacgctttaatgccacaatacttttttatcggtttgtgggatggatgatgaaaaagattgttatggctggcgcgctgcttaccctggccggatgcgttcaggttgatacctatgaggcggtggtcaaagcgccggcgccggcagggctggaagggttctggcaatcgaagggaccgcagagcgcaatggtaagtcctgaggcgattgcgacgtttatcgttaccaaagacggagatactctcgattgccgtcagtggcagcgggtgattgctgagccgggaaaattaatgaaccgcgacaatcaggtttataatgtgaccagcagcctcgatatttatcctattgaacgtaatggaaacacgttggaatacgatcgaatgacgttaacccgtgttgaacgcttaacgccggaatgcgagcaggcctggaaaaagaaccagacggtgagtacaaccgcgcagtaatcgatattggcgggccggctataaagccagcccgctgacctcaaagcacctcttcaatcacccacacgcttacgctgcctgcattacaggtgaatacggcattgccctcgtcatcagtctcaataacctcttgtcgattattgagaaaatccttccagcgtttattggcataattctcgccaagcggtaacgttttctcgccatcgtcgccgttggagagcaccactacgcagccaggatgttcatcggtgccgctgcggctgaaggcgatacagttaggatgatcgaaccacagcgtttgtacgccgtgggcgaaacgctgacgcgcatcgatgagttcgtgaagctgctcgataaccggcatctcgatggagtatgtctggccatctccgccggtatcttcataacttgcgccgaacaggtcggcgtaaaataccgagggaacaccgttttcacgcagtaaaatcagcgcataggctagcggcttaaaccaggcctcgaccggcgcttccagcgcctgaagcggttgggtgtcatgatttgtgaccaacgtgaccgcatggaatgggtcggcttccaccagcgtcccggtgaagatttgactcatgtcgtaatcgcggccctgacgcgaggcttcatggaatttcatctgcagcggcgcatcaaacagcatggtattaccgtcaacaaggtcgatgtactgctgtagcttatccacctcgtgtgaccagtattcggcaacaatgaatagcggtttatcggtggactcctgtacatgctcaatccactctttataaaaccatgccggaatatgtttgacggcatccaggcggaaaccatcgcagccggtctgttcaatgacccagcgggcccaatattttatctcttcggtcacggcatggttacggaaatcgatattttcgcccatgagataatcgaagttgcccatttcatcgtcgacctgatcgttccagccatcgccggtgtagtcattaacaactttgaatacgccatcttcatcgggattttcgatatggtcgataccgctaaaacatttatagtcccagataaattgtgaatatttgccagcgcgggccggaaaggtatagcgggtccaggcttcacattcgatgatttcttccgcgatttgcgtgcggtcctgttcatcaacgcgttgtacgcggatgcgttctttctcatcggcgcccatcttgtggtttacgacgacatcaagaagtacggcaatttgatgctcttttagcgcattaatcgccgctaacagctgagctttatcgccgtatttggtggcaaccgatcctttctgatcgaattcaccgaggtcgaaaagatcgtaactatcgtagccaactgaataaccgccggaagcgcccttataggcgggcggcaaccaaatcatattaatgccaatttcattgagatttggcgcaagggcttctacttcccgccataactcgccaccttccgggtaataccagtgaaaacattgcaacaacgtgggatttttcatcttccatgctcctggcgtcatcaagctgacctttgcagtatgggagataactggcaaatatgaataatttcgttgctttttcgctataccctaaatagccgcatatataataaattggcataagatgtagcggatagatgttggtaggctgctgctaaacgccttacactacacgaaaatctcattatattcggggtatctatgaaattagcacttctgggtcgtcaggcgctgatgggcgcaatggccgtagcattgatggctggtgtaagcgtgaaaaccttcgccgctgaaaatctgcttaatcaggtcaaagagcgcggcacgctacgcgttggcctggaaggtacatacccgccgtttagttatcaaggcgatgatggcaaattgaccggttttgaagttgagtttgccaatgaactggcgaaacacatcggggtgaaagccgatctcaaacccaccaaatgggacggcatgctggcttctctcgattctaaacgtattgatgtggtgattaaccaggtcactatttccgaccagcgcaagaaaaaatacgacttctccaccccttatactatttctggtgttcaggcgctggtgaaaaagggtaacgaaggcgtgattaaaaccgcggcggacctgaaaggtaaaaaagtcggcgttggcctgggtaccaattatgaagagtggttgcgccagaacgtacagggcgttgatatccgcacctatgatgatgacccgacaaaatatcaggacctgcgtgtaggccgtattgacgccattttggttgaccgtctggcagcgttggatttggtcaagaaaacgaacaacactctggctgtaaccggtgaagcattctcccgtcaggagtccggggtggcgttacgtaaaggaaatgaagatctgctgaaagcggtggacaccgctattgcagatatgcagaaagatggcagcctgaaggcgctttcagaaaaatggtttggtgcagacgtcactaagtaacgtctgaagatgaaaaaaggcgctgataacggcgcctttttttatttcgccagcaactgcgtgcataataaggataactgagtctggaggtgccatgtcactacaaaatttaacgcgttttccgcgcctggagtttattggcgcgccgacgccgctggaatatctaccacgcctgtccgatcatctcggacgggatatttttataaaacgcgatgatgtcacccccatggcgatgggaggaaataaactgcgtaagctggagttcctcgccgccgatgcgctgcgcgagggagctgatacgctgatcaccgcaggggcgattcaatcgaaccatgtgcgccagacggcagccgtggctgcgaaactgggactgcactgcgtcgcgttgttggaaaatccgataggcacgcgtgctgaaaattatctgaccaacggtaatcgcctgctgctggatctgttcaatactcaggttgagatgtgtgatgcattaaccgatcccaacgcgcagcttgaagagctggcgacacgtattgaagctcagggataccgtccatacgtcattccggtcggcggatctaacgccctgggcgcgttaggttatgtcgaaagcgcactggaaatcgcccagcaatgtgaaggagcggtggagatctcttcggtagtggttgcctccggtagcgcgggtactcatgccgggctggcggtaggcctggaacagctgatgccaaatgcagaattaataggggtgaccgtgtcacgtagcgttgccgaccagttgcctaaggtggtgacgctgcagcaggccgttgccaacagtcttgagctgcaggccaaagcggagattaccttgtgggatgattattttgctcccggatacggtacgcccaatgaagaaggcatggaagcggtgaaactgctggcgcagctggaaggtatcctgctggatccggtttataccggaaaggccatggccgggctgattgatggcattaatcagaaccgctttaaggatgaggggccgattctgtttatccataccggtggcgcgcccgcgctgtttgcttatcatccgcacgtctaatgcagaataaatcgaatgcaagaaagtatccaactggtcattgactccgcgccttacctgttaaaaggcgcggtttttacgttacaactgagcatcggcggtatgttcttcggcctgctgctgggctttatcctcgcactgatgcgcatgtcgccaatctggccgatcagatggctggcgcggatgtatatctctattttccgcggaaccccgctgattgcccaactgttcatgatctattacggtttgccgcagttcggtattgagctggatccgattccggcggcgatgattggcctgtcattgaatactgcggcctatgcggcggaaacgctgcgcgcggcgattgcctctatagataaagggcagtgggaagccgccgccagtatcggcatgacgccgtggcagactttgcgtcgggctattttaccgcaggctgcccgcgtggcgctgccgccgctctctaacagctttatcagcctcgtcaaagatacttcgctggcggcgacgattcaggtaccggaactgttccgccaggcacagttaattacctcacgtacgctggaagtatttacgatgtatctggccgcctcgctgatctattgggtgatggcgactgtgctatcgacgttgcagaattattttgaaaatcagctgaatcgccaggagcgtgatccaaaatgagtgcgattgaagtcaaaaaactggtgaaaaaattccacgggcagaccgtgctgcacggtatcgatctcgaggttcaggaaggggaggtcgtggcgattatcggcccaagcggctctggtaaaaccactctgttgcgcagcattaacctgcttgaaagccccgaaagcggtaccattcgcgtgggcgatgtgactatcgatacttcgcgtagcattggccagcaaaaagggttgatccgccgtctgagacagcacgttggctttgtgttccagaacttcaatctgtttccgcaccgaacggtgctggaaaatattattgaagggccggttatcgtcaaaggcgaagataagaacgaggctatttctctggcgcgtgaactgctggcaaaggtagggttgtcgggaaaagagaatagctatccgcgtcgtttatccggcgggcagcagcagcgtgtggcgattgcccgcgcgttagcaatgcgcccggatgttattctttttgatgagccaacttctgcattggatccagagttagtgggcgaggtactcaacaccatccgtcaactggcgcaggaaaagcgcaccatggttattgtcacccatgagatgagtttcgctcgcgatgtcgccgaccgcgccattttcatggatcaggggcgtatcgtcgaacaaggtaaggccagagagctatttgctaacccgcagcagccgcgtactcgtcagttccttgagaaatttttaatgcagtaaatgttaccattctggcgcggctgaccctaaccggcagggcggtcgtgaccagataatcggcgtacccgccaggcggatgggaaatgttagccgttcagccagaccaaatgtcgaccattccatcgcagattgaaaatcacgacgttgcagcggcgcgaaaggcatctcatgtcgtgcgccaggccactccatcaggctggctgcgacgcgagccaatgacagccgcgcatgataacctttgccgctctctatgcgttgcgttatcccttttagtactgcggcagccatcagatagcccgtcgcgtggtctaacgcctgtaccggaagcgggattggtttatccgcgtcgcgccagcgttgaccggcatgggcgataccacaggccatttgcaccagactgtcgaaaccgcgtcggtttctccatggcccctcccatccccaggcatttagtgaaacatcaacaattcccggcgatagcgtggctctggtatgacaatcaagacctagcgcctccaacgcgtcagcgcggtaaccgtgaacaatgacgtcggcttgcgagattaacgtgattaaacgttgcttatcgatttgtgtttttatattcaatcgggcgcagcgcttacccagcgtaatctcttcttcgagcgttggttcttgccagtcgacaggatcaatacgtaatacatcagcgcctaaccctgcgagaaaacgagtcgcgacggggccagcaataatccgggttaaatccagtaccctgataccgagcaaagggcgggagggggagaggggccaggcaaccgacggccccggcggtgaatcggcttctatcaacagcggttgccggctgacggcgatgccctgcggatgtgatcgccattcttccgcgctgcgcatcgccgccgcgcaaccgccattttccaccaccgcttgttccagcgcatgcgagcgccattgacgaacttgttgagccagcgtttgccgcgtcgcatgttgccccagaatctgcgccacggcgagcctgtggtggggggcattcgtatgcagtcggatccaaccatcttctgtttgataatctcccgctaatggatcccaaagctgctgtgttggacgattatgcggcctggcgctggctgaaaaccaatatgacgccagccggcgatccactattggcatggcggctgttgagcataagcgggcaagataagcggcggcgatccccattgaggcggcagcaaaatcactgactgcaaagcaagaagataaagcctctgggtggcggaaatcgattggcgggacagagcttgcgctaaagtcttgccacatccgggaaaagagctgcatagacgaggacggcgagagcatattttcctcctgagttcgataaataatcgccagcgaaaatcgaataatgcgatggctacgttattttatacatataaataagatttatgtgttagttttatgtatttataataatgattatcaatcaggggttatttggtaggttatgagggacattgattttttcagctggcggcgggatatgctgcaacaattccagtcaactcatgatggggattcggtttataaccttctccaacagcaaacagaagaactggaatacgactactacgcactctgtgtgcgccatccggtgccttttacacgcccgaaactgacgctgcaatcaacttatcctcaggcctggatgtcacattatcaggcggagaattattttgctattgatccggtattacgcagagaaaattttcttcgtggacatctaccgtggaatgaccagcttttttgcgagaccccggaattgtggaatggcgcgcgcgatcatggtttaaataaaggcgtgacgcagtgtctgaccctgccaaatcatgcgttgggcttcttatcggtttctgctaaaaatgcgcagccgggtccgtatcacgaggacgaattagagttacgtctaagaacgctgaccgagcttagtctgctggcgttgctgcggctggaggatgaaatggttatgccgccggagatgaagtttagccggcgcgagctggagatcctaaaatggaccgcagaaggaaaaacctcggcagaggtggcgatgatattgtctatttcagaaaatacagtcaattttcatcagaagaatatgcagcggaaatttaacgcccccaacaaaacgcaaatagcctgttatgccgtcgcaacaggattaatttgagcgaatcgctcgttctgcgtgtcagacgtgaaaccggctgtcagcaatcgctttcagccggtcctttcttactgacggtaagcttgtttaatttgcttaacggtgctggagaatacggcagcctgagcctcatcttccatctgcgcgatttgcttttccattttaataatcacgcggccagcatctgcctgacccatagcctgaagcattagcgtcagcagggctttcaggcaggagacttcctgcgccaactgttgattattttctgcagtggaaaaatctggtgtgctcatcgatatcctcgtttgctattagcgctgtcgcgcaatactaaatgttaaggcggcgcagtataccacaagcggtagaaaaaaaaggagcgcgtgatttgtgttgctgatgttgcgcgctgagcggttaaatttactgaataatatctgttcatctaagtgctcatcgttaatattttccgccgcttttggcggaagttaattattgttacatctttcgaatcctattaatccgcaacccgttctgttgctttttttgcgccttctgtagggtgaatgttaaaaaagaaacataatccaactatatgttctgtataggtttccacctggtgtggagacaaattgccataaatgggagggaaatcttcttcaggacactttttgggcttttaaagttacgataaaacccggtaatatatgggagataaactatcagtagcgttatccctaattctggagattattcctttgatcaacgtacttcttgttgatgaccacgaactagtgcgcgcagggatacgacgcattctggaagatataaaagggattaaagttgtcggtgaggcctgctgcggcgaggatgccgttaagtggtgccgtgcgaatcctgtggacgtcgtcctgatggatatgaacatgcctggtattggggggcttgaagcgacgcgaaaaatcgcgcgctccattgtcgataccaaagtgatcatgttgaccgtgcatactgaaaatccgctgcctgcgaaggtcatgcaggctggcgccgccggttacttaagtaaaggtgctgccccgcaggaagtggtaaatgcgattcgttgtgttgcttcgggtcaacgttatatcgcttccgatatcgcccaacagatggcgctcagtcagattgaaccggaaaaaacggaatcaccgtttgccagtttgtctgaacgtgagttgcagattatgctgatgatcactaagggccaaaaggtcaatgagatctcagaacagttaaatctgagtcccaagacggtgaatagctatcgttatcgaatgttcagcaaattaaacattcatggcgatgtggagctaactcacctggcaattcgccatggcctgtgcaatgcggagtcgttagcaagtcagtgagtgatgtttttgacgcaaaagctttcctcaagacggtgaccagccaaccgggcgtctatcgtatgtatgatgctggtggtaccgtcatttatgttggcaaagcaaaagatctgaaaaagcgccttagcagctattttcgcagcaacctggcttcgcgtaaaaccgaggctctggtggcgttgatcgcgcaaattgacgtgaccgttacccataccgaaacggaagcgctgctgcttgagcataactacatcaagctgtatcaaccgcgttataacgtgctgctgcgtgacgataaatcctatccctttattttcctcagcggcgatacccatccacgactggcgatgcaccgtggcgctaaacacgccaaaggcgaatattttggcccattccctaacggctatgccgttcgcgaaacactcgcgctgctgcaaaaaattttccccattcgccaatgtgaaaatagcgtctaccgcaatcgctctcgtccctgtctgcaatatcaaattggccgttgtttaggaccgtgcgtcgccggactggtaagtgaagaagagtaccagcagcaggtagaatacgtgcggctgtttctcgccgggaaagacgatcaggtattgacgcaactgattgcccggatggaaaaggccagccaggcgcttgaatttgaagaagccgcccgcatccgcgatcagatccaggcggtacgtcgggtgacggagaaacagttcgtttccaataatggtgacgatctggatgttatcggcgtggcttttgatgccggaatggcctgcgtgcatgtgctgtttattcgccagggtaaggttctcggtagccgcagttatttcccgaaagttccgggtggcactgagttgggtgaggtagtggaaacctttgtggggcagttctatctacagggcagccagatgcgaaccttaccgggggaaattttactcgatttcaacttgagcgataaaaccctgcttgcggattcgttgtccgagctggccggtcgtcgggtgaatgtgcagaccaaaccccgcggcgaccgcgcgcgttatctgattgctggcgcgcaccaacgccgccgttgcgcttactaccaaactgtcgcaacaatcaacggtcagccaacgtctgcaggctctggcgacactacttaagctgccggcggtgacgcggatggagtgctttgatatcagccataccatgggggagcaaaccgtcgcatcctgcgtggtgttcgatagcaatggtccgctacgggcggaataccgtcgctacaatattaccggtattacccctggtgatgattacgcggccatgaatcaggtattacgacgccggtacggtaaagcaattgaagagaataaaatcccggacgttatcctgatagacggcggtaagggccagcttggtcaggccaaagccgtgtttgccgaactggatgtgccatgggataaaaatcatccgctactgctgggggtggcgaaggggagcgatcgtaaagccgggttggagacgttattctttgagccagaaggtgagggctttagtctgccgccggattctcctgctctgcatgttatccagcacattcgcgacgaatcccacgatcacgctatctcagggcatcgtaaaaaacgggcgaaggtgaaaagtaccagtacacttgagacgattgagggtgttggcccgaaacgccgacagatgttgttgaaatatatggggggtctgcaggggttgcagaaagccagcgtagaggaaattgcgcaagtaccgggtatatctcacggactggcagaaaagatctactactcgttgaaacattaggggctctgtagcaccatagggctaattaacacttacaacatacagttacccgttaccatgcgatttaatattccgacgttgctcactctgtttcgcgttattctgataccgttttttgtgctggcgttctatctgccttttagctgggcgccttttgtctgcgcattgattttctttgttgccgctgttaccgattggtttgatggctatctggcgcgtcgctggaaccagagcactcgctttggcgccttccttgatccggttgccgataaggtgatggtggctattgccatggtgctggttgcagaacactatcatacctggtgggtgactttgccggcagcgacaatgatcgcgcgtgaaattattatttctgctctgcgcgagtggatggctgagctgggtaaacgcagcagcgtagccgtatcatggattggtaaagtgaaaacgacggcccagatggcggcgctggtctggatgctgtggcggcctaatgtgtgggtggagtgggctggtatcgttctgttcatggttgctgcggtgttgacgctgtggtcaatgttacaatatttgaacgctgcgcgcggcgatttgcttgaacagtgatcgtttcgacgcaaatttcagcaaacgacacgaagttgcgaaaaataccgttgactcaccgcgtgagataagtagaatgcaacgcatcgaacggcggcacagtcttccagacgataacaaaatcaagtgattagctaatctacttgatgatgcgggaatagctcagttggtagagcacgaccttgccaaggtcggggtcgcgagttcgagtctcgtttcccgctccaaattaaaagcatcggcagtagcgggtgtttaggtattaaaggcgcgttagcaaagcggttatgtagcggattgcaaatccgtctagtccggttcgactccggaacgcgcctccactttatatcccgagcccggatggtggaatcggtagacacaaggggcatcggcagtagcgggtgtttaggtattaaaggcgcgttagcaaagcggttatgtagcggattgcaaatccgtctagtccggttcgactccggaacgcgcctccactttatatcccgagcccggatggtggaatcggtagacacaagggataatttttcaacgaacgcatagcgattcattttttctgaccgccgaccaccggcacgattttagtttttctgtcgtaaattgccgtttgcctcgaatttttatgaccagaaatcgcctgtttctcttcgaggcttccttccagatcagagacacctttcgctttcagatcgtggaaagtgaaatctatctgcaggtgcgggttcttttcctgcgctgcgattttggcgtcgcgccagcgtgaattaaaaccgtcgcgggtgtatttgctgccgctggtctggtgaatgacaaacaggctacgtatacccggctttaacggcagggaacgggcgagggcgacagcggcgcgcaggcgaggcgaccatgctttgatttgctttacgcctgtttttccctggcggatgaagatcccggtttcgcgtatctggtcttcagtcaaagccagcacatcgctttgtctggccagacacaaataagcgatttccatggtggcgcgaaccacgtccggagcaacgtcgtaaaccgctttgtattcttcgtcggtgatgtaacgctccctggccgtctctttgaacttcttaacgccctgacagggattatgctgaacgtaaccgcgctcataaccccaacggaatacccgcgaaagaaaactcttttcccggttagcctgcgttttactggccatgccacgctgatccatatagcgccggatgtgttctggtttaattttatccgggttaaccttcccgaataccggcaacactttgcctgcgtatttcgtgtagtcttttcgggtttctgccgctaaatcctgccagtcaggggaagacatgaattgatcggccagagcctgaaacgtcttgcgctcgacttcttctcccatggctttttcatatgccagccatacagctgattgaggctcggagagcgcacatagcctgatagccttgttatctttattcctgaattcatacgccgccttgccgcgatacacgcggggcggcatccagttatcagcggggttcttacgctttccggccattaaagatagctccgaagtctggttcttcctcccgcaccgtctcttcctgctggttgcggtattttatcgggttcaggaaatggccccacgtcgttttaggatggccgtctgccctttccatgaaaaagactccggcccggcgtagcgcttcacactgccgcgatttaagcggtgtccccgtcagttcgatcatttcctctctggtgatgatgtcgtgatcgtgtctcatggtctttcctcagcatgccggctatcgcgttgtctgccgtatcgcaagcgcgttggatatcggactgggtcagagtcctctttctaacgctggctgatagcctgccaattttgatatcgaaatctgaaagtaaaagtgtgcctggttgccaacgtagcattgtgatctccggttcataggtagatcacaatgctaacgacagttgcgggttatttctgattaggcttaatcaggtttggtttattccggaacgcgccattttcgcgggtgattttggcactgcgcggaaaatgcatagccagttcgcaacgcgcgcaggcttcgattatcccgttagtaccgtccggaaaaacgacgtgaagcgcgtcgcctcgtttcagtgtgagtttcagcatatcagcgcacctgcagcgaacgttcgccaatctcaaggtgagcgcccggcactgggtttaacagttcttccggtatctctccgccgtcagcggtaatctgtgccgccgctgcctgtgctgattcaatcgcttccttgatggcctttttatcgggcgcgataacaacctgagtattcaccagctcatcgggaagaagatcggtattatcaatcacaacgtttacgctacctttgcgagcggtgaaagtgttttttgccgttttcagcttatccagcccggccgccatcaggcaggagagaatatacttacgcagagccttatccttattctcaaaagacttcttacgttcggccaggcgttttatttcatcatcgcaggtgctggcattgccgaggttattacgtgcgataaccatgatggaatccagtttatcggccagttctccttccatgccttcaagggtatcggcgatcatttccggagtcaggtcatcagagctttccagcagttgcagcaggttctgataatccgcggcgatggcaatagcagtagtggaagtcattatgctttctcctcagatttattaagttcggcgatacgtccatttttgatatcagtgagacggcgcaaccggctactgaggtggcgggagcgctgtgtgtctccttttgattctgcatccttgcggtgaacttcgagttcacgggcgataggggcaaacaccttgttaatttcgttcaccgatacagcgtttgcgagggtattggcgttgcgggttagtttgtcgtcgaactcctgacgcaaccgcgctgcatcttcggcggtttcgctggcattcttgaggtcaaactctgctttgtttttctggcgatattctggattgtcatagaggcccataaagatatcgccgctaaagccgaggccggatagtgcttttttagtagcatcagtgagtgatttttttgtcgcctcaccatcgcaaatcgggccgtatttactgccgtaaatgtatggtgtgcagccgaatgcaaattcttcgccgcgtacatcgttcttcagataccaaagcctgattttaataacgtggtgcttctccatgaggataccacccataccatcagggatcagttcccacgtgttattgccatctgcacccttgatagtgcgggtaattggcgcgcctgtatcaaaacgttcttccagaatatcaacgccccagccctgaccttttggcccaaactctcgtgtggccatcatagtcatgtaggtgccattaatggatgttccgccaccgtttactgagaaggccgtagtaaagcgctcatctgtcttgaatacgcttttccacaattcgaggttgtcccgttcggttgcctgcatatcgttaatgctctggacaacttcggcagctttcggcaggttctcttctcggttaattcgttcaacaagctgatcaacgtcctgaacgatagtttttactttctcactcaacttctcttctggctctgcactttcaccagaggcatatacgccatagcccatatcgttgagcgtctcacgcgcctgtttggcctgggtatcggttacaaccgacggcggcacttcctctttttcgcccgcgtttgagggggtattttgcgttgcctctggttctttaacggatcccgcctcggtttcctcaaagcggccgttggccgccagccatgaatcgatatggcggcgcaggctgtcagggaaatggtaggtatcttttgccggtacgttctgtaccacgccgaagatgctggcgcggtcgtatttgagtatctgcggcgtggtgtgcagcgatgctgaccagcgtttaaaatcttcccggtcatcggaaatcatcttcttagcgtccagaaggtttccggatagtaccggcgcatcaggcgccagcgggagaagggcggtagcgatctcctgatccagcgttgcataagtgtgtttatacccgcgcttagaaataaccactggcgttttattgtcatcggtgctggtgctgagagcggtatttttatatacgccgggggccagttcgtcgcgcttgcccggattctcaagccagcgtttaacgaactgagagatagccgctttgcctggcgtctggttttcaaagtgggagaaaatcccctgaacaaggttattcagaccttccacatgcatgctttgaaccgggaagttattttgcagggcgcacagcacattaaagttaaagcgatcttcctcttcaaattcgccatcgtggtttttcaggttatccagataatccacaacctgagaataaagatggccatcaatcgccgcggtgctaaaaagcaggacggcagcaaagcgttcttcagcggaaacggtcatcaggtcgatcacttcatcgtcggcaggtaaaccagcgccgcttccggaagcgctatcctgcgcagtagaaacccatttttcaccgtcaaaagtatgctgctgggcgaatgactcatcgaactggccaacggtcggcagcggctggccttcaatgtgttcccacagttttggtttgaaatagttgtcaccattggccgggtatgattcccagagtttgccagtcatgatgctttcggccacttttttgtttggcgcatcgatggcgatcgccagctgcacggcgccgcagtctttaatcgccgatttctttggctcaaataagccgttgtagatggtcattagtctttcctcttggttactggcgcaggtcaggcgccgggtaattaaaatggaatgtcgctctcttcaatctgagaatgatcgatgcacagcagctgctgaattttgtcatcgaccgcggcgatctggcgttgagcatcggcagcaaggttttctttctggctgcgcagctggtcaacctgcatggctataaggtcgaagggttccggctggtttatatcgatggtgatatcacgcgtttccagtagcacataaatgtccgggtggttccgtgacatgtcacagattgaaacgtgatatttatcggatgagaaagtattagtgatgtagtgaacgtaaagcttcacggggatggtaagcgcttccatagcgactccttgatgatatatactcagagccgatcagcggctctgtcgttggtctttcctcgctgcagggttggttccctgtagcattccgggcggtttggtcactgtcccgggtaaattagcccacttcggtgggcttttttacgcctgaagattgccggtctttcccggctgtcagggtggtcaaccccattggtctttcctcgtaactgcgtttaaaaagtgcccgccgtgggggccgggcaaagactacacacagcaatggatgttcgttgcggtctttcccgcatgtcatcgtactgtcggcgacccgaagaattcgcgcccgtctttccggactgtcagaactgtttctgaacaactgccgcgtggttagtgcgtcgttgatgtgatgtaatttagataaatctaacaatatggtcaacggttaaattagaaaaaacgaacaatatagacgtaaaaaattacatctatttgattagaaagggattatttttgtttacgggcttgcagtaactcttcaaataaacgattgaaaccgtctactttttcgcgaagttccgttaaatgccgctctttttcagattctgggagtgacgaaaagagttttaaaagctctgtttctcgttcatctaacggcggcggggtatctaccggggttcccggagtggcggcttcatcgccgtaaagtatccaagtagggctgcattgaagtgcgttacttaaagcgaataggtttttcccgccaggctcactatcaccggtttcccactgggagatagtgacgtgcgcgacgttaaccagcttcgctaaagcgcgctgagtaagtttgagatcttttcttcgcgctctgatgcgctcacctggcattgtcatagttagataattctaaatttccttgacttcgttatctcgaacacctaatttgttagaaaaatctaacaggagggtgtttcatgttaacaactgatgcgatcaaatattttggtagtaagagaaaactggctgaggccgctggcgttaaggctcctactgtctatgcgtgggggcgtttggttcctgaaggtaaagcagctcgtttgtctctgatgactgatggcgaacttgtttatgacccaaaggcttaccaactgccagccaaatcagcttaacaattggcggcatcgaaatctgattacgcttaatcaattttcagcgacaggagacgctcgaagtggaatacctcgaagaacttaaacgagagatctttaactgggcagcggaaagcgggcaggagctggttgctatcgagataagccgcatgtggtttcgtcttggtggtaataccggttcgctgaagctgcaccagatcgaagatgcagatggaaacgccgactggcgggcaatcaacaacaaccgccaacaaatttttcgttggttgcgaggcgagaccaaagccgcgagagccaaaactctggcgctggtcaaagcgatggaagcggcgctgccggcagagcgttacgctcgcttgggtatgtccacccagtatttaatttgtgtggccattcgtgagtttgccgcggcgattatcgcgctgttactcgacgccagagacgggccgcagcaagtcgctagagcattgcaagctatgcgagaaacacaacgcctgaccagcgtttaacctgtaccgaggaaagaccaatgagaacacaagaccgcatcacctggcggaatgggtttcgccggaacggggtacaagtcccgatggaagatatcgaatcgattttcgaggaacgtcgcgccactgcgctgacaatctgggaacgctacgaactgcgcaaggcagacctgcaggaagcgggactcacccagaaagaatacgaaatcgcctgccgtcagctggctgactcgctggggatctgagtatgaatattttgccattactcgacaggccgatcgccttccagcgcagttttattcgtctggatattggtgtgacggctgcgctctttctgtcacaaatgacctactggactaaccggtccgacgatgacggatgggtgtataagactcaggaagaatgggaagaagaaaccggcctttcccgctatgagcaggagggggcgcgtaagaaactccgctcaattggtgtactgctggaaaaaagaaaaggcgttcctgcacgacttttctacaaagtagataataacgttttatatcaggtgcttgcggctgcaaacaagaatgcggaaaaaccacatactggaatgcggaaaaccaccaaacaagtcaggggaaaaccagcaaactttcttacagagaatactacagagaatatagatccctctaaatctcccgttgggagaggcgaagggcatgtattgcgtgaacaactgatttcacttctcgaaggtcaattcgattttgataaagctggtgaacttcacgatgccgttgaagctgtgattgttggtgctggctttgactgccagcgtgaatatccggtcgctgatcgtggcgatggtcgcagaggccgcgttgatttactggtaactggaagcaatggcgaacagtgcggcattgaaatcgatcgcatcaacgtgcgcgataaatccgtgacaaaattaaaacagctgagcgacggttttattctggtacgagatggcgtaatcacagaacgctacgaatttgacgggatcgctgtaattggcgcacatccggcaacatcatctgttgcgaatatatcccgcgagcaactcctttctgatgcgaaaaaagcgctggagttttacaacgttcaaaccggtacccgttgccgtgacatgaaaccattcctgatgctcatgacccctacgacaacccgcgacggctatacgctggacgatgttcagctagttattcgatgggttctggctacatggcgtcgccggggcgacagtctgccgaaaccggcaaacatctgccgtgtatgccgttttgatggttatcttactgacgctgagacctgggctgttctggaagctgagatcgaccctgaagccgtcatgagcggcttcaacgaaatttttgctgatacgttgccagcggcagagctggacgacgatcgccgtcggatgattaccagactggccgcccacatgaaaaacaaaaccacgggtgcattcctgggttatttcgaaaaattccgcgctgatgctcctgatttttatttcggtacagatggcggatggcgagccagctttgactacctgatgaaaccagaaacgttacgtaatacccgggaaggttcgttatgactccgcaggaactggaagcttgtgtgctggctggcctgctaaatggcggcgccagtccggacgcattcgatgtgatcgcctctacgcctgaagaatctttcagcatcgggtttcaccgtcgcgcgttctccgaaattaaaaaacaggcgctggcgaacggcctgatcgacatgctgtttgtcagtgaagcgctgggcggtagtagcctggctgatttatcagaaattacacgtatgcctgccacggtaccgaacctgaagggttacgccggcaaaatggttaaggcgtggcgcagccgccgtatggccgaattactgcagcagggcgctgatggcatccggcaggcaaacaaccaggaacagcgcgatcaggttgttgaaactgccgtggcgcagctgctggatatgactggcgacactggcgacgtgcagccggtacacatgagtgagttactgccggtgtacatggaaaccatgcagaagcgcatggatggtgaagagggtacccgcaacctgaaaaccgggatcgaagaactggacgatgcaaccggcggaatcaacctgcaggatttgattgtcgtcgccgggcgtccgggcatgggaaaaacagaatttgcgctgaagattgtcgatggtgttaccgctgccggcggtggcgcgttgatattcagcatggagatggccgctgcgcaaatcgtagaacgctctctggcgggttctggcaacatgtcagtgtcacgcctgcgtaatccccttgatatgcaggacgaggactgggcgcgctttacagcggccatggagaccatgaacgggcgagatatctggatcgttgatgctaccgatctgacgattgagcaaatccgcgccgttgccgaaacgcataagcgccggtatccgcatctggcaatgatcgttgtcgattaccttggcctgattaaaaaaccgaaggcagagcgtaacgacctcgcgatcgcccacatatcccgaaacctaaaaactatggctatgcgtctgcatacgccgacgttcgcgcttagccagctttcccgcgctgtggattcccgcccggcggcccagcgccgcccggtcatgtcagatctgcgcgattccggttctattgagcaggacgccgacagcatcatgtttctgtatcgcgatgaggtttacaacccggaaagcccggcggctggcgtcgctgaaattatccttggtaaaagccgcttcagtgccgcaggcgcaattatttatcaggaatttaaaaacggacactttctgtcaatggatcagcatgttggcaaagagaaaacacgtatccaactggaggccgcgaaaccccggaaacaaccccgtaaatactctgagaaattcaataccgatgcattttaaccgcgcctgaccagcgcgatttaaccgaggaaagaccaatgaccacgaatttaaattacccaaaaccagtaaaaccggatgatggctgcaactggctccccgttattctctggcgcatgaacgccggcgcgcgcgcccgcagccgttccgtgttcgttgcggcgccacgtccggcccctgtacccggcatcacaccgcaaaaaccgattaagcgtgaaattatcgcccctacggtttccggccgcaggcgtaaaacccacatcggcaccgtgatttattccagaggtgaaaaaaacgttcgcctgagtgaaggcgctaccgtctggtctgctggctctaatgagcatttcgataaaaaaacgggccagcgcgtcggcagtattggccgtcaccgtctggtgctggagagtatcagcccattgcaggccagcgacgaacagcaggacgccgggagcgtcaccgcgcagcagctggtagccgtgatgaaaggcaaaacgctttcttaccagggcatcctggcattaatccagaagcactatccagattgtcaggtgacgatcaaagaacttcacgatcgcgtgttcggcatgttcatgtcgaattacgtgggtatcacccgtcacgacgatatgccggtggttcacttcacgcttaacagcgtcgatccccgttattacatcgagtcagcgaagaacaagaggacataaggccatggccgggcaatcagattacttgccgcccggcttaccgctcaatcgcgccaaatggccgcaggagtgccagatcaaagagcactacgacatgcgcgcctcggcactcatacgccagctgtttgagaagaaagtcactcgacaggccatcgtagaacagattgcagcgacgccggaaagctaccgggagtttttcaaagcgagattaaatttttggcgggagaagcggacatgaaaaagctttttaaacagggttttgaaaattacagcgggcgtacgttgcgagttttcgccctgacattgaattttgttgtgttgtttatcgtgatcgcggcgctgtcagccttaggtatctgcatggttaacgtctgggtgaatcaatgagcaaaaaatacactttgatttatgcggatccgccctggacgtaccgcgataaagccaaagatggcgagcgtggcgccgggcataaataccagaccatgactgtgctcgatatctgccgtctcccggtctgggaactggccgctgaaaactgcctgctggctatgtggtgggtaccgactcagccactggaggcgttgcgagtagtcgaggcgtggggcttccgcctcatgaccatgaaaggctttacgtggaacaaatgctacagccggcaaaccgacaaactggccctcggaatgggccatatgacccgggcgaacagcgaggattgccttttcgctgtgcagggaaaattgcccgcccggctggatgccgggatcgttcagtcattcacggccccgcgtctggagcattcgcgtaaaccggatatcgtgcgcgaaaagctggtgcagctgctgggcgatgtaccgcgtattgagttattcgcccgccagtcgtcgcatggtttcgacgtgtggggcaaccagtgtgaatcgccagcggtggcgctgctgccgggcattgcagaatatatcggtgaggttgcttaaccatgaaaaatactattcaggatttaatgaatcaccagtttgccatgctggaaactgtcactgatcccaatatcaaaggcgacgtgcttcaggaagagttatcgagggcaaaggcggtagttgagatcgtcggggtaatggtcggtacttatcgcgtcgccctagacgctcagaaggctatttatgacggtaccgcaggcaatgtgcctaagattatggggatcgaaaaatgatagagaaatacactccagcccaggagttgtttatcaggcagcatatcaaaagctccactgcgcgggaattaactgaaatgtttaacgctcaatttggtacaaataagagcgtgggcgctatccgtatctggtgcaaatctcatgggttaggaaagcagtttttaattgagccgcgctataccgatgagcagctaactttcatttatgccaacaggaatctaacgaatgctgaactaacagaacggttcaacaggcgattcggtaccgataaaaaacctgacaatatcaaggatgtaaagatagctcgcggatggactcgcgaacctaaaggccggaaacgcattcttccccagtacatcactgttaataaagagaaaattagactcgatgtatacgtatatgaatgcgtacatggaaaattaccgaccggttattcggttatacatctggataatgatcttaataataacaatatcgataatctgcgcgctgcccctaaagaaattcgccgcctgttttctggcgcgggctactctaaaatgccgcaggtgcttgctccggcgctgtatgcacaagttatgctccgccatgcaatcaaacgattatccagctaactgaggtggttaatggctaaatcatccgcagaacgtaaagccgcgcagcgagcgcggcagtccgccgccggcaaccggaaaattgagctggttctcgatgcgcaggaactggacatgctggcgcgtaactgcgccgcccggcgtccggggcgtgaaccgtacgaactggccgagtacatagccatgctgatccgtcaggatgatgcgcggcttagtggccacatcaaatcgatcagcaaacgcctgtgtggaaagtgcggtgagtcgctgccgatcacctcctgcccgtgtgctggtgattcgaaatgctgggtaacgcgagggtggcacgaaactaaactgtcagcatagcgaacaaccataccagataaaacagaaccgtcagaaatggcggttttcttttgaattcaatcggatattttgagatttattgttgatttttaacgattagtgctcttaaaaatttgcgctcactgtcagttggtagtatatatactgtaattttatacagtattgttgtcgagggagaggtagtggttgataagaaagacgcaggagaccttctccccgacgatggtgatgtactgataacgtgcgaaaatgggaagattaaaaagacgagaatcgtccatcccgatgagcacgtagcgacacttaacgcgttgtttgaattagctaaattgactggttataccattatcaaaccagacggcaatatgctataattaccacgttggcctgaacacccaacaccatgtaattctgaacaattgctgcgctaaaggggaacccaatggcgcagtattcttttgtaaaagcacccggcggtgtattaattccggcaacgcctgacgcccgcgaattcttagaaaaaaaagttcgcatgggcggtattctgtatgcagattttaagcaggcaagaaacccggcatttcaccgtaaatttttcgccctactgaatcttggatttgattactggcaaccttccggcggtgcaatatcgccagctgataaaaaactggttcgtggttacgtgcagctggtagcccactatgccgggcatgccgacacattgcaggaactggcggatcagtatctccgcgatgaggcagaaaaacgcgccgggaatatcagtgcggttaaatcgtttgaagcgttccgttcctgggtaactatcgaagccggtttttataccgaataccagatgcctgatggcaccacccgcaaggaacccaaatccatatcgttcgccaaaatggacgatgtagaattctcccaactgtacaaatccgtattagacgtcctctggaattttattttattccgcacattccccaatcaacaggccgcagaaaacgcagcctcgcaattattcagctatgccgcctgagaaatatcgccatgaccaaagacgataaacgctggctggaagacgttgcatcactgggttgcgtcgtatgcagaaatcttggctacggcgctacacctgcagaagttcaccatatccgcaaagggcagggcatagcccaacgcgccgaccacaaagaaactctcccgctttgccctccacaccacagaaccggcggacacggcgtagctatccacgcagggcaaaaaacatgggaagaaaactacggaacggagactgaattgctcgaacaggtcactaacgaggtaaaggaattacgcttatgcagaatttaattccgtctctaagagcagcagataacgctaaaaaatgcggttggccaacacgtcgggaaagcatgaaattctgttcaggctccttttccattctggcgggcggcgattttgcccttctctatgctcgcgcacgcgcgcgtttagggggctgatttatgccgctggtcgccaccttccgtacagactggttccgggtcattaccgacctaaccagaaaaaacctcaccactcagcaaatcgccgatgaacttggcgtttcgaaatctgccgttctcggttggaaatccggatcagaacctcgccacggtcacggtgaggcgctaattgctctctggtgtctggctaccagctcagaccgtaaaaaactccccacggtgctttatcggcagtggtggacgttccgccgccctgtttttggtcgggaaactgaccagaagggcaacacacaatgacgactcactaattcaggagtgaaaaaaatggctcgaccgaaaaaaatcgttgagacgccggggcaggaaaaaactgtgtcggatgaaaatacgcttatggcggaatcgcaattgctgaattcagaaactgcgccgcttccggtcgctgtggagaaaaaagcctcagcgccagaaattcaacagcgtgtagcgcagctgcttgatggtaccgctcttgccgaacgtaacgcgatccttgccgctctcaattctcagggtgcaacaatcatcgctcgttttgatgaactggattttatttccatcaatggccagcgccttaccgacaacctcgaatttcttaccctcgtacgaaaagccactgatgttagcaccggcggcgcgggtgcaatggtgacaaacgaagagggcaagccgcaaccggtacgcggcgcaccagtattaaccgaacacggctggcatgtgccgggctaagggggaatcgtatgtgtggaggcggtgcaccaaaagtcgtagagcaggatccgcaggctgaggcagatgcagcagccgatgcagcagcgaaggccgcgaatgccgacgccgcagcacgcaagaagcgcaaaaaaggttcctcgttgctggcaagcggtgccgaaggcgcaacggatacaggttcatccctgctttcctccggcgctcaggcagcaaaaaacaccttaggggcataatcgatggatgatctcgccgtaaagctggttaagcgtgccgatacgctgaaagccaaccgacaggtgcacgaaagcgtctggcgggaatgctacgactacacctatccgctgcgcggcgcggggctatccgatgaggtgctggatgcacagagcgcgaaatcaaaggtggcacggctgcttgacggcacggccaccgacagcgcccgcatgctggcgtctgcgctcatgtctggcatgaccccagcaaatgcgcagtggctgaatctcgacagcgaatcgctgccggatgatgccgccgcgtggttgtccacctgcgcaacgctcgtatgggaaaacatccacgccgccaatttcgacgccgaaggctacgaggcaaatcttgatgtggtgtgcgccggctggttcgcgctgtacatcgacgaagaccgcgaagagggcggattctcgttccagcagtggccgctggcgcaatgctatgtaacatccacccgtcgcgacggcatcgtggacacgatttatcgccgctaccagctcaccgcagagcaggcgattaaagaattcggcgcggataaggtcagcaagaagattcgcgacgcggccgccaaaaagcccgatgacaaattcgatttcctgcactgcatttttccgcgtgaaaactacgtggtgaatgcgcgcctggctaaaaacctgcgctttgcatcgtacaacgtggaagtgagcggcaagctcattgtgcgcgaatctggctatcacgaattcccctgctgtgtaccgcgctggatgaaaatccccggtacgtcgtacggcatcggcccggtatacgacgcgctgccggactgcaaagagctgaacgaaacgaagcgcatggagaaggcagcgcaggatctggcgatcgccgggatgtggattgccgaagatgacggcgtgcttaacccgcgtacggtcaaagtaggcccgcgccgtatcctcgtggcgaacagcgtgaacagcatgaaaccgttgctaaccggcgccgatttcaacgtggcctttaccgcagaagaacgcctgcaggcatctatccgcaaaatcatgatggccgaccagctgcagccgcaggacggcccggcaatgaccgccaccgaagtacatgtgcgtgtggcgctgatccgccagttgcttggcccggtctatggccgattccaggctgaatacctgcaactgctggtagagcgctgtttcggtcttgcattccgcgccggtgtattcccgccagcgccggatagtctgcaaaacgctaatttcaacgtgcgctatatctcgccgcttgcccgcgcgcagcagctggagaacgtaaccgccattgaacgccttggcgcgaacgtggcgaatctggcgcaggtatcacccgatgtgaccgacctcgtagacaccgacgaagcaacacgcgtgatagcggatgcgctgggcgtaccggcgaaagtcattcgctcgtctggtgccgtcgaacaacttcgccagcagcggcagcgggcgcagcagcaacaagcagggcaggcactcatgatgcaggcaggtagcgaggcggcaaccacagcagggcagcaggtgggcgcagcgctgggccaacgagtagcggggggctaatgactacaaaacaagtatcaccggcggactacaaacgcattttcgaggaaatgccaggcgggccgcaggtgctggatgaattaacgcgccgattcgggcgtgcggcgtacgtccccggcggtgccgagggtgaccgcgaaacctgttaccgggccggacaacgcgccgtgctcgatttcattctgatgcaaatcaaccgtgcagatggagtaaacgacgatgtggaagattaaacacttattcatgaacgccgagcagggcgccgaagcgccagcaggcagcacagggggcaatgatggtggcaatggcggtggtgctgaaaatccgggcgctgataaccctgctggtacatcacttctcagcaccggctcgggcgaacagggcgcgaatgactggatacctgaaaaattccgcgttgtgggcgaggacggaaaactcagtattgaaagctcagcccgcaaactggcggaaaattactctctccttgaaaaacgcatgggcagcggcgacgcgccgccaaaaactgctgatgactatgccccagaggtaaaggccgaaggcttcaactgggaagaattcaaagctgacccacgcatgcagtcgtttatgaaatcggcgcacggcaaggggatcaccaacgaccagatgagtttcatcatcagcgagtatgcgcaaatcgccccgtcgctggtcaacggtgcggcggaactggatgctgaatccgctaccacgcagctgcgagaagtctggaagactgacgccgaatttaacaagaatatcggtctggccttccgcgcattcaattccctgaccgatgaaggtgatcgcggccgcatcgatgaaatcggcaataaccctatggtgatccgcatgctggcgaaaatcggcgcggaaatgcaggaggacgcaccggcgggcgccgacagcaacccggcagagcagcagaccatccgtgacctgatgaagtccgaagcgtacatgaatccgaagcataccgaccatgagcgcgtatctgcacaggtgaaagcgtactaccagaagcgttacggcgatcaaaccgtagcgtgacatgtcaccataagccaatcgaagccagcctgacccgctggcttttttatttggtcgggattccgaccgcgcacctcgctaacaatcatcccacaaccagcccggcggggacgccggataactgaattttcccgcaatgcgccagcgccaaccgcattgtgctgatttgggccgggaataccgacaacccgcaggcgatactttctggagtgattattatgtcatttgataccgctaagaacatgatcaccgctgcgtttatccagcagttccatgattctttcgaaattgccgcacagcagaaggattcccgcctgcaaggtgctgtgtacgaccgcggcaacatcaccggtgcgtcgttcaccatcaacgatatgggtaccattgaaatgacccagatcaccgagcgtttcggtgataccgtctgggatctgcctgatgctggcacccgtaatgcgctgatggccgactatggcgtattcgtgccggtggaaaagcgcgacctgcgcaaactgctggctgacccgcaggggccatatttgcagctgacgctggccgcatccaaccgcaaaaaagacgacgttatctatcgtgcactgctggacgacgttctgcgcaaaacttccaacactggcgcgtacgctccggttgcgcttcccgcatcgcagaaaatcgtcgctggcggtaccgggatgaccaaagcgaagctgatcgccgcaaaagccatgttccgccgtaacgagtgtgacgagcagaacggtgaagagctgtacatcacctacaacgccgacatgcttacccaaatcctcagcgataccacgctgaccagcgccgattttatggcggtgaaaatgctgcaggaaggggcggtgtctggtaactggctgggctttaagtggctggcctatgaaaaactggattctgctgaagcaggtgatccagctgtcaccaccaaaaccgcagttgcctggtgtaaaaccgctgtgcatttcggtaccggcgaagagtacaacgtcgatatcggcccgcgccgcgataaaaacaacaccattcagatttccgtcgatgcgtcctatggcgcaggccgcgcagcggaaaacaaagtagtcgccatcgatttcgtagcataaagccgctggtgcctttgccgggggatatctcccggccttttttcatctgaggtaaggctatggctgacagtatttctatctgctctaacgcattgctggcgctcggtgctcacccgattaacagtttcgacgaaaacaccgatcacgcccgtctgtgctcaaacctttatcccaccgtacgcaataagctgctgcgcgcacatccgtggaactgcgttgtaaaacgtgtggttctctctcctgtcagtacagcaccggtattcggtttccggtttcagtttgcactgcccggtgatcttcttcgcgttctgtccatcggggaaccttacgacgatattccgtaccgtgttgagggcaaccggctgctgacgaacgtgcaggtgctgaagctgcgttatgtgttccgcaacgaagacgaatccacctgggatgccgcgctcgttgatgtggccgaaatgatgatgcaggcaaagctggcctatgccgtcactggctctaccagtctgcgcgacagtctcgcccaggaatcgctggtactgctgaagcaggcaaaggccgtggacggtcaggaagacccaccggaagagcttggcggctacccaacgtacgaatcgaggttctgacatgcgcgccaatctgattaaaacaaacttcaccgccggcgaaatttccccgcgtcttatggggcgcgttgatatcgatcgctatgcgaatggcgcgaagacgctggaaaatagtgtggtcgtggtacagggcggggtaatgcgccgccccggctcgcagttcgtagcggccgcaaaatacggcgacaaaaaatcccgcctcattccgtacgttttcaatcgcacgcaggcgtacattctggagtttggcgacggctatctgcgaatttaccaggatggtaagcagctggtgaacgacgacaacacgccgtacgaaatcgccagcccgtacacctctgacatgctgccatcggtaaattacgttcagggcgccgataccatgtttctggtgcatcaggctgttaaaccctatcgcctgcagcgacgcgggcaaaccgattgggtactggagccagcaccatttatcgttgaacccttcgacgaagtgcgcgacacgccgcagaaatggtgcaagccatcggtgaaagaattcgtcggctctgaaatcacgttgacccttagcgatgacgaaccgccagaagatagcgaagacccgccaccttttactggtgatggttgggtgcctgaagatgtgggctcgtacgtcaggattaacagcggtctggtgctgattaagagcgtaaccagtgcgcaggttgccgtcggtaccattcgcaccgatttaagcgcaacgcaggcggcatcgccgggcgcatggactcgcgaggattctgtctggactgatgaatttggatacccgggcgcggtaacgctttaccagcagcggcttgttctggccggttcgccgcaatatccgcaaactatctggtggagcgaatcgggcgtatacctctctttcgagctgggaaccgatgacgacgacgcgatcagctttacgctgtcttctgaccagctaaacccgattgtgcacctcgcgcagatgaatacgctaattgcgctgacgtacggcggcgagtttaccattaccgccggtaacgatgcggcgattacgcctaccaacatttcggtaaaaaatcccagcccgtacggatgcaacgggatccgccctgtgcgcgtcggtaccgagattatgttcgttcagcgttctggccgtaagctctacgctgtcgcctatgaccccgacagttatgtagcctactcggccaacgatatgaccgtactggcggaacacatcacagaaggcggcgtgatcgatatggcgtatcagcagcaacctgatgcgtttacctggctggttcgcagtgatggcgtaatggtgacgatggctatcgaccgggcgcagaacgttgtcgcgtggtcacggcagatcaccaatggtgcgtttgagtccgtagcgactattccctcagcgactgacgatgtggtgtacgccattgtgcgccgtactgtcgatggccagaccgttcgctatgtagaaatgttcagcagcgccctgtacaccgatgcagccgtgacgggctccagcgatgctggcgcaacgacatggggcggcctgtcgcacctcgaaggcgagaccgtcgatatcgttgcagacggctctgtgatgccgcaggcggtcgtatcatccggccaaatcacgctttcgcgcaaagcctacaaagtcgaaatcggcctgcacttcgaaacgactattaccacgctgacgcctgaagtcgctacgtctgaaggcaccacgcagaatacccgcaagcgcacaagtgaagtcactatgcgtttcctcgaaaccactggcgccgagtgcaacggccaggtgatcccgttccgcacgttcgggccaaaaatcctcaaccagccggcgccgttattcaccggcgatcactactggggaaaattaggctgggagcgcggagaagactcgctgactattcagcagcgccagccgctgccgttccatcttctcgccattgtcatcgtatttaccagcaacgggggctaatgatgattcgtaacgccacagccggggatatcccggcgcttatcgaactgggaacccggatgtatctcgagtcccgttactcgcaaaactcgccgtttgatgcggataaatgcgcagaactggcgcaaagcctgatttattcgccgtctggttgtgtgctggtcgccgaaaaagacgggcaggttatcggttggcttggcggcggtattgccgagcagtttttttcccgccagttgatggccttcgagtatggcttatttgtcgcgccagaacatcgaggcggcagcgccggcccgcgactggcacgtgcgtttatcgactggtcaaaagagcacggcgccgctgttatcaacatgggtattaccactggggtgcacgcagaacgcactggccagttgtattcgcgtctcggcctgcagcaaacaggcctgctttattcgatggaggtttaacaatgtgcactggcgtagaaatcgctgtaatagcgtcctcagtgctggccgccggcggcgcagcgtatagcgggcagcagcagaaaaaaatggcgaactatcaggccgcccaggcggaagccgatgcagaggcgagccagaaagccgcaagggtggaagccgaccgtatccgtaaagccgggcgtgaacaggccgcagcggctaacgcttcgctggcggcgtcgggcgttgaaactggcgaaggtaccgcgctgcgcatcacctcaggcatcaccgaagacgcagagcaggacgcttaccagacgatccttaatggcgtgaattcctctaaccgtctgcaggcgcaggcacaggccgaccgcatcagtggcaggaatgcggcgacggcgggaaacatcagcgccggcagttcgcttttaagctccggcggaacggcgtatagcggctggcaaaaggctaaaactggcaaatacggattatatgcggagtaataaacgtgagaattccaacgggtaattttggcaatgtagcgccgcaggtacaacctacgcgcgtcgcggtcagcaatgtgggcgctgtgggtaacgcagtatccggttttggctctgctgcggggcaggtagcagagcaggtgcagcgtgatcaggataaagccgacgtagcggcgacgcaggctatcctgaccgatctggaagctaaatctaatgaccgctgggaaaacccggagacgggcgccacggtcacgcgtcagggctttaaatcgtccggtgtggtcacagatatggataaggccgacgctggcgattacgaggaagcgcgcaagcgcgttccgcccagccagttaaactattttgatgctcagtggaaagcggggcaggtacgccggacaagcacctatagcggtttcgagcgtgcgcagactgaggaagcccagcgccagcagcttaatgcgacggtgacctcctcagtggagcaggaggccagcgcctacgataacccgatgcaggcggggctgatacgcagcgcccgtaaacactcgatcgagatgtatggccaggctcgcggctggtcgcaggaacgtatcgatggtgcggtctcagaagcgaaccaaaaagcgctggagcagcgcgcgcagaactacgcggtaaccaatcccaccggctggcttaatggcgattttacgctggtcaacagcggtaccggcgaacttgatatgcgcgccgttggcctggtggaatctggcggtaaacaccgcaatgcagacggtagccttgttacatcacccgcgggcgcgcagggtgaatttcagttgatgccggacaccgggaaagagctggcgtctaaacgtggcgtggaatacaacccggacgatcctgtgcagcatgcgcagctggcgcgtgattatgccgggcagctcagtaaaaaataccagtcagaaccactggccggggccgcgtataactgggggatgggtaacgtcgataagttgatcgccaaagtgggcgacccgcgcaaaggcgaaatctcgatggcggatttcgttaagcagctgcccgcagaaacgcgcggttggttgtcccgctacaacaaaaataaaaccggtctcgacccggtagcagtaaacaaaatcgacaatatcgccgaagcgcagatccggcagcagcgtacggcgctgcgccagcagattgacccgattctcaataatacaatggcgcagctgtataacggcgaggtgccggatgctatgccgaacgcctccaccattttgtttgcgtacggtgagcaggggcaaacagcggtcaagcagctggatatcgcgattgataacgccagaaccttccaggctattcagtacgccaccccggcagaacagcaggccgaactggcgaaagtgaagccgcaggcaaacgatcccgattttgcgctaaaacttgatgcacacggcaaacttagcgcgctggtgcagaagagcaacgccaatattcaggcgcagcgcgactccgcccgctttaacgatgcgctgctctccggcgagaaactcgacccgagcaataaatctatgcagagggcggcggacaatacgccatcggcgcttaatttccgcattaacgatgcaaccacccacgatgctatcgtacagcaggtaaatcagaccggcattgttccgtcgcaggtaacatcacagctcaatgctatttcccgctccagtagctcagatgtagtgaagcaaggcgctgaaatattcaataggctttacgactctaaatcttctaacgtcagtgatatgccaaaagatatacaaagtttttatctgacaattaagcaattgaccgaagctggtatggcttctgatgaggcagtgaaacaggcacagaatataacctataaccagaacgatgcattaaaaaatcagttaacttcgacgcagagcactaaagaatataaaagcgagcgagatagtgctatggattcagctcgaaatagtatggctcagtggttcagaattgatccaaaggcaagcgatacaacaactgatgcagttaattttcgaaatgactaccagtccctttacgatatcaactatcgaaattctggtgggaattctgaaattgccaaaaaaatgaccaacactcaaatctctcgtaactggagcattagcgaagtgaacggcaaggcccagttcatgaaatatgcaccagaagcactatataactttggtccgtcaggttggcaggctgaactgtggaaagaaaaaaaagaggaactaatgtatggcaagcgtaatgaggagatctctaccagcccaacgcagttaggaatcacgtcaggaactgcaacaaatattatctcaaacacccccgagtctaaagttggtggtgaattggaaattgtgcctgatgtatatactccaagaattaaagattatgcaatttggattcgctttaaggataaagatggtaatgaaaaggctcagccttataacgacaaatttggtaggcaaatgcggtggaggccatccctagaggaatgggggccttaccagaaaatgcagaaggaacgagagcagaaagaacaggatgaaatttcgcgcggaaaagatattcgcggatttaaagcgaaacatcgagcattggatgagcagtaccagcgtttgcatgatgagcgacttgaacgtacgaaaaattatttttcatggagtaatgaataatgccaatttaccccacacccagcgaattcagtaatggttatatacctgctggtagcgccctggatgccccagtagggttcgatattgatttacctgaaggtgcaaacccggaacctcaaccgccacaaccgtccgtatggagcgctgcattccgacagaataacctactagcagggatttttcggcctgcaaaacaatttgaaccggctgaagggtataacccttacgctgataagaatgaaattcacggctatgagcaatggggatctgctttcgcagattctcagtcaccagaagaaacagcctggattaaaaaccagattgacgatgaaaacgaagaccgccgtgtactgtccgaggctggcacagagggaactttagccagtatcgctgctggggctatcgatcctgtcacggtggcttcgatgttcatccccggcgcccagggaactctggttgcgcgcattggttcgcaggttgctatcggtgctgctggtaccgcgcttagcgaggttgtgctcaacaacgaacagtataccagaacagccagggagagtgccgcgcatatcacagccggcgcacttctcagcggtgtatttgctactgctggcgctatgatcaccccatcggtaagaaatgcggcaacccgggaagtagccgaggcgctcgataatatgaatgcctcgccaacgattaataacgcagccgacgccctggcggatactttaccgaacggtggcagcgtcggcgctatgcgtattcgcgaggcgacgctggaagacctcacgccagtgtccggcggcccgctcggcaagctggctaaaaaggccggtagctatctgacgccgatcacccgcctgatggaatccccatcaaaagaagcgcgccggacagcgctggagctggcggagaataacttcacgctggaaggcaacctgcgcggtatcgaaactccggtagctgccgagacgcgcgtacgtggctggcgccgcgaagaggcggccgtcgttactgctaataagcaggcatacacccagtataaagccgagggcggcgatctgggttatacggccttccgtgaacaggttggcgaggcgctgcgtaacggcgacgtgcatgttaatgcgaaagtgcaggaagcggcgcaggcaatgcgtacggtcattaaccgcgtgaagacagcccagcaggaactgggcttactcccgccggatgccgaactgaaagcgatggggcagaccagctatttcccgcgcgtgtacaaggtggggaaaatcgttagcgagcgcgataaattccgcaatatgctggttgactggtggtcacgcggtgagaaaaccatgtcccgcgaagatgccgaaatcgccgccgataccactattaaccgtattgtcggggccaaaattccgcaggagttcgccaacgtctttatggtgaaagcgccgggtagcactaaatcgcgtacgttgagtgttcccgatcgtctgatgaaagactatctggagagcgatgcaaattacgtcctgcagcgtcatatccgcgaagcctcagcggagatcgaattaacccgcacctttggcaacaaatcgctggattcgcagcttgccgccatccaggacgaatacgacgcgctgatgcgtttacgcccggcagaacaggaaaagctggcgaaggcgcgcgaagccgacctgcgcgatattctggcgctccgcgatcgcctcgttggaacctacggtatgccggatgatccatcatcatttttcgttcgcgccggtgctttcctgcgtagcgccaactttgtaacgaaactcggtggcatggcggtatccgctattccggatctggcgcgcggcatgatggttaacggcttcagcaataccatgcgtggatatggcgcgctgatcactcgatcaccggcttacctcgccagccgggcggagcagaagaaaatggctgtagggctggaaactattcttcaaacccgctcgcgtacgatgggcgatctggtggatagctcttcgcgcaccactgcgatcgaagcgggcatggagcgcattaccgatgtgttcggcaagctgaccatgatgggccactttgacgacatgaacaaatcggtaaatggcatgattacttcagacggtattttgtcaggtgcgttcccggcgaaacgtctggctaagctcggcatcaatgacaaaatggccgaacgcatccagaaagagtttcagaagcacggcgaagtcattcagggctggcatatcggcaatttcgaaaaatgggatgaccagtacgccgccggcttgctgcaatctgcggtactgaaagacgtaaacaataccgttatcacgccgggtatcggtgatacgccgctatgggccagtaccccgctggggaaaactgtattccagtttaagtcttttgctacggcatcctataaccgcgcgacgctcggtggcctgcaggaaggtaccgcgcaattctattacggtaccgccttccagattggcctgggctcattgacctatgcgcttaagcaggcggctaacggtcgcgaggttgatttgacgccgcagaagatggtactagagggtatcgaccgttcgggtatcctcggcccgctgatggaatacaacaacatggcggaaaaggcatctggcggcatgataggacttgggccattgctcggcaccggtacgcaatcccgttatgccagccgcggctttatcggttctgctctggggccaacctttggcctgctggatactgtaaccgatgtgaccgctggcgtgctgaatggcgacgctggagaccgggtcctgcatagcgcgcgaacgctgttaccgggcaataacctgttctggatcgcgccgctgattaaccaggtcgatcccggtatgcgttgatagcctagttacacgaactaacagtaactgcattgaagaatgttccggaggggtaggtgtaaacatattgcatctccccacctaatctaatgaatgaacccagtggatttttattcgtgcataacccattttttgttatttcagccattcgagatttagcaacgtcgattgaagtatgggtctctgaagcggtagccagcatttcttcttcggttacgcctagccttacctgcgcgattattttgtttccatcagcagaaacatctttcattattacgttttctgataacgttaagggcagtctggggcgtacctgagtgacgattttctgagcctgttcgcatacatcaaactcagttaagtttggtttacacttatctgctgcgaatgccggatgtgagatcattactaatatcgaaattagaccaatttttttcatgaaaaataaacgcctttatctgagtgttaggtataagaaacatttaacaaaaaaccatacagcgatcaattttataattagattagaaatagtcaggattccgacctctaagccgacacatcatagccctatggataaacacggggcttttttatgcattcagattacaaaactcgccttactgctcttagcgataagctcaccgacgtagttctggaagaagccgatccggacaactggccgggggcagggaaggaaatcacaaagcacaccaaacaggaacgcggcgatcggtactggcataagaagaatgcggccgcatcgctaaccttgttggtaaaagtccattcacttattggtatgcatactcgcggaggcacgccgaagaccggcggagaagatccggacgatgaagcgttccagttaggtcagcaggtagcagctgctgagcgtaaagcgctggaagtcatcgagaggatacagcacaaaggcaaaaaatgatttcgttcctggccttctttttgatgtgggcagaacggatgaactgggatgtgccggactgccactataaagcctgccactggctggagcatcgcggaaacctcgcggtgcttcgctgttttcgtggctttgggaaatcaactatcctgggcgtttataacgcctggcggtattactgcgatcgccagtaccgtattctgcatcagtcggaatccgatacaaccgccagaaagaccagccgcgatacacaaaacgttctgcgtaatcacccactgacgaaaggtatgttgccggacggcatcggtaccatcgagcaatggtgggtaaacggcgcgctggatatgcgtaacgccagcatgttcgcaaaaggcattctgtcgaacgttaccggcgcccgtgccaacgagtgccagaatgatgacgtggaggtgcccggcaatatccagactccggaggctcgcgaaaaactacgctatcgcctaagcgagcagacgcatattttgatacccggaggccggaaattgtttatcggtacgccgcatacccacgatagcctttacgacgagaaagaagcagagggcgcagattgcctaacgataaagctattcgataaagaacaccgcgtcgaagcgaagaaggcaaccaaaaaacgataccggataccgttccgcccggaatatgttttcgtggggatccacaaagccgcccggttattgatcgagggtactgattatcgattgacggaagacggtgtggagttcgcggcaccgcctgaaactgtcgtggatttttatgccggctgcgcgtggccaggccgtttcgatcatgatgaattactgctgcgccgtaaagagtgccgcaccgtcaacgaatgggatagccagtaccagctgcacagtaaaccggttggcgaggttcgtctcgatcccgaccgtatccgcgagtacaacgtccagcctgaaattcgctatgcgaaccgttcctgctcgatgtggctgggccagacgcaaatcgtcggcgctgtcgcctggtgggatgtggccaccggcaaagttaaggccgacgcctcggcattttcccttattttcaccgacgcccgcgggcatctttactggcatgtttgccaggggttaactggcgagctggcagagtttgacgacaacgacaaaatcaccggcggtcaggtgatgcagattaaagagctggtgctgaagtaccagatcccgctggtctgtgtagaagtgaacggccccggcagtttcgccgggaagttgcttattcaggcgctgaagggtaccggctgcggcgtacgggaagaattcagcgtcaccaacaaacaaaagcgcatcctcgatgcattcgaagcgccgttgtcgtcccggttcctgtgggcgcataccgacgttctcgacggccccatgtacgaccagatgcgggatttcaacccggcgttaacaaaccagccagacgactttatcgattctggatccggtgcgatcagcgctacgcctgtacgtatcggcaaattagtcgggattccgaccgcgcaggcgagggagcattggcagccatacgatggcgacatttcggtcgctgtagattactagccgccggagcttcccctatgtcggtacctaaccaaattccttacaacatctatacggccaacggacagacaaccgtatttacttacgaattctacatcatcagcgccagtgatttagaagtaagtatcaatggttccgttgttaccagcggctataccgtatccggcgttggtaacaaagacggcggagatattacgtttctgacgccgccggcgaatggtgcggttgtcatgctcgaacgtgtggtaccgacataccggcttactgattaccaggataacggcgacctcctggcggataccgtcaataaggatttcgaccgtatctggatggctatccagcgcgcgtttattgatctcgggtttgctcttacccgtcctttttttggggggccattcaacgccaaaggctaccgaatcgaaaaccttgctgaccctgtcaatgaccaggacgcagcaacaaaaaaatatgtaagtcagactgtaaaaacgaatcttaacagagtgctgagagttcctgagcagatggtaggggtggttcccccagtagcagttcgcgagcagatgctattaggttttaatagttttggggatcctgttgctatcgcaggtcagacgcagactgccgatctcgctttaaaattagcagcgtattttggtacgtctttaattggcatgccgttatcaggcaacctgtttgatcttgttaaaaacatggttacaccagctatgtttcacgcaaaagcaggaaataccgataacggcggccttagctttgcccatgataattctctgtgcttccagaaaatgtttaatgctgtgcgcgacaacggcggtgggctggtcatcattgatgatgaatactgtgtcgatttttgtcttttccctcattcgaatacgacagtgatgtttgtgggcggcggctccatggagtttatcaatcctcgttccgcgactacaggccgtggtggttttatcattggaagcagccgggagtttaactttgatttggcatggagtttgttccagtctggtgcatatcctggctcaatagttaatgaagcgttcacagatcccgtgcaaaaacagtacatacgcgataatcagcagttcgttcaggctgaacgagtgaatttcataaacccggtaataaaaacatactataccgatccaacatactggggagggtttgctattaactgcgtgaatgcgcaacacgtcagaatactgaaccctgtgttcaatggatggactgaaggtgtcaatgtgggctccgacgtcccgccgaatacaccttcgtgttatgacgtgaaaattcataatatgcgagtcattaaagccgatctcgttagaacttattacgctggttttttctttgcaaactcgacaaattgtgaaatatcagatggctctcttgaaacaccactgaccgcgggcaccagaaacggtagttttggggcacttaatttcacagaagactgcgttataagagatattaacgtcccaaaccttgggcggacggtttcctccgaaggtattttaatcaacaactccaagggttgtttggttaaaaacataaaaatgggtaatgctaaatcggccgtcagtacattttatgtcgatgcaacaacgaatgatgcaaataacccaaactttatagatggggttgaggcgaacaattgcgatcaagcgctgggcgtaactggtaagtatgcggtgttttctaacatcaaagcgaccaactgcctacaagagttgtttttcagaaatgctaatgcaacgggaaaccggtttaagagcaagccggattcaataactataagcgaggccagtgcaaacattaaatactggtatctgatcaataatacgattggtgggtggcgtcgtaaatttacgtggttgcgcccattggatatactgcgaacgccgttcacttctctttcatcatggaattcgaataattctgtgaaatttaacaaaggtgctactgcaacttttttatataagatccctgaaggtgctatcgctgtttcaggatttacagcatacggtgattttagtgtgggagctgcggcagcggctacggattcggtatgtacgattgatgtaatttcaatgtctgctgtggacgggaatggaacagaccctatagtacttttatcggcatcggtttctgcccgtgcaaacggggacggtatctggtcagtctccgcagatgttcaatcatcttcgccaggatatttacccgtagagggggctagctcaggcgttgataacacaatgtacctgcgagttacatactcgaacggtgtggcaaacaatacccttaaagaaatagggttaagaatgtacgggaactaaaatatgaatggcacagaaactaagcaggttgattatctgtatcgtgggataattgattactttagcaatatatcaggtctggatattacgaccgagcagatcaaactacgagacaagtttattaccgaaagtgcgatagtgtgtgatgattctttggatgcacaggtgattagcctgcaagatgaattcatcgccgccggtggaaatcctgagcaagaaaagctagtgatcgcaaaagcacttaaattactaagcctgtaagaagttagtcaggattccgaccaatactaagccttaccctcgcatcactacatacagtgatccccgtgggggtaaggcatgcgaatgaagaatttgccggatgtagcggcgggaacgtcgtatataacatccaccgtgagcggcagctactggttgctgcaacttctcgataaggtcagtcccagccaatgggcggcaatcggcgtactggccagtattgttttcgggttacttacctacctcactaatctgtatttcaaaatcaaagacgaccggcggaaggcgcaggactatgagcaacaaagttaagttcagcgccgcgatgctggcactgctggccgccggtgcatctgcgccggtgctgttcgatcagtttatcagcgaaaaagaaggtaacgcgctggtggccgttgttgacccgggcggtgtgtggtcgttgtgccacggagtaaccgttatagatggcaggcgcgttatcaaggggcaaagagcaaccgaagcacagtgcaagaaagttaacgctatcgagcgcgataaagcgttggcgtgggttgaaaagaatgtgcacgttccgctgacgccaccgcagaaggtcggcatagcctcattctgcccatacaacatcgggccgggtaagtgcttcccctcgacgttctaccgcaagctgaatgccggagaccgcaaaggggcatgcgcggagatccgccgttgggtattcgacggcggccgggattgccgactgaccaaaggccaaaagaatggctgttacgggcaggttgaccgccgggagcaggaaagtgctttgacgtgctgggggctgtacgaatgaacggaaaaaccaaactggtaattgttggtggcgtgctggcggtatgcgccggcattttctgggctggttatctgaaggggtggtacgcgcattccgagcacgtaaacagccaggctaaagccagactgccaaaacaggaaaaagcggtagcagctggtgagcagaaggcggcgacggcgaacgccgaagccaaagttatttaccgtaccgtttatcgtgatgtggtgaaatatgtcaatgactcgaatcgtactgtgtgcaagtttgatagtgacgctgtgcagctgcgccaacgagcaatcgatgcggccaactccatccccggatttgatgaaccggccgtgcaatctaagtaacgctggcgcagatagcgacgctgatctgctggcggacacgcaatcagcggagtgcgtgcgggagctgcgtaccaatatctaccgctggcaatcgtggtatcgtgcgactgaataaatattgaatttggggtatgataagcgtcagaagatagtctaaaatatcgctgtaacttattgtattcatgatgctaatttattggcgtatgttcggatttatttcatatctaattgatatttatatttaaaatccctcggcgttcgcgctgtgtgggttcaagtcccactccgggtaccattgggataaagtagaataatcaaagcaataagcagtgtcgtgaaaccacctccgggtggttttttcatttctgaaacgtcatttcctgacatcattcctaatatactccacctgcaaagatagactctgagcgcgataaacgttatttgtcctatgacaaaacctgtggtgcttgctacgcttaacgggattttcgaaccaggcaacaggagtaggggaaatatgtttaccggattgtgtgcttttccgctgacgccgatgcgcaacaatgaagtagatagtcgcgcgctaataaaaatcatcgaacgtctggtctcggcgcgagttgattcgctgggcattctgggctcaaccggcagctacgcctatttgagccgcgagcagcgcaaaatggtggtcctggcggcaaaacaacatgcgcaaggggtcccgatgatggtcgggataggcgcgatggcgacggatatgattctacgtcttgctgaggatgctcagcaggcgggggcggatgctgtgctgctaccagtgctgaactaccagcctctgacggatgatgaggtgtttacactgttccagacggttaaccgccatgtgtcggtacctatttgtatctatgataacccgcgcaccacccacagagccttttctgatgcgcttgttgagcatattgcttcgttatccaatatcgcatcaatcaagatccccggtttgccggccgaccaggctggcgtcagagtggcgacgcttcgtcagcgattgccgcagcgagtgagtattggcgtcagcggcgacgcttttgccgcggcagggtttaacgctggctgtaatctgtggtattccgtttgcgccggtctgttcccgcaaattgcccaaaatattaccgcagcagcgttgagcggcgagcggcagcaggcatcggcactaagcgaacggctggagccattatgggcattgttcagacagcacggtagtctcaaagtgattgccgctgccgcctctattcttgaactagccgaagtagagtgtttaccgcgaccgttggccccgctctccgcggaggccattaacgatgtcaaatcggtcatggataagctggatctacgctgaagtttaccgcctttcccttacctatgtttatcaggaaatccgcaagccatttaaggtaatatatcactggcgttaatgttgacgctgtattgatattctttgggtatgtgatgcctttatggcaatgataactatatatgagggatcttatggccacgttgcttgaaagctacgggaactgttttcgaaaatatgccactttccgcggccgatccgcgcgccaggaatatgtggtttttaccattgctaactttatattgtccgcgatcctgggattgatccccgtcattggcggtatcttcgggttaattattatcattccggggatcgcggttgcggtgcgtcgtttgcacgatctcaacaaatccggctggtggttgctggcgccctacggcattatgctgatcggtctgattggtattgccgctaccgtcgaagagggtagagccgcagtatgggtatgggtgatcgcgctgggcggcctggccgcgttggtaatgtcgatttggatgatttttacccgtggtaccgttggcagcaaccgctttggtgatgaacagaacgatgacaacagcggcggtaatacgatgggcaagagttctgccgcggatgatgtcagagagcgcctggcacaggctaagaaaatgcttgatgacggcgttattagcgcaagtgaatacgaagtgatgcgtgctaatatcattaaagatatgtaaccgatccgctgccgggcttgcccggcgttaataaattcacctgtgtgagcgagagcgggtggttttctcctcccattttcgctactgtaagcgccatttttctaccatcatgagcctgtaatgaaaaccggacccctgaacgaaagtgaacttgagtggctggatgagatcctgtcgaaatatgccaccgagggcgccatccttgatgtctccgaacttgatggtctattaacggctatcttatccgggccgagcgaaatcgaaccagcgcagtggctgcttgctatctggggcggggcggataatgtaccgcgctgggctaacgatcgcgagcgcgaccgtttcgttaacctgacgctgcagcatatgagcgacatcgccgaacgcctggctgactatccggagcagtttgatccgctgtttggtacccgcgagtttgaaggccaggaactgaccattgttgaagagtggtgcttcggctatatgcgtggcgttgccctctgcgactggtcgacgttacctgcggaactgcagccacagcttgatgccattgcgttacacggaacggaagaacgcttcgaagcgctcgatacgctgaccgcggatgaatttgtcgaaagcgttgatagcataaagcccgccgcgctggctttatataattactggatggagaatgctcagccgacggccgtgcagcaaccggtaagaaatgagagcaaggtggggcgtaatgatccttgcccctgcggtagcggtaaaaagtataagcagtgttgtttagctaaataacaaaaggggccaaccaggccccttttgtttaccccacagcgggtaataatcccgccacaatgcagaattgaatgacgactatcgctacaccacagcccaataccagccacagcgcaattgagccgcccggtacacgccatgtcgcctgtgtgtgcagtttacggctcttcatcaccagcaatgatggcagcattagcgccagtacggcgagcgctacgccggcgtagcccagcgccatcacaaaaccttgcggataaaacagggcgaaggccagcggcggcaggaaagtgatgacgccgctctgtatgcgtccggcaggggtatttttacgctggaacaaatctgccaggtaatcaaacaaacccaatgcgacgccgaggaaagacgtcgccagagcgaagtcggcaaacagatgtaccgccacctctacatgcggcgaggcgacaacgtcgcgtatcgctgccagcaggccgttcaggccggaattcttcgccagcacggcggtaaaggccggagagtcgatgctgccaagcgtggcgagttgccagaagatgtaggctaccagcggaataaaactaccgatgataaacacgcggcgcagtttgcgaatatcgccattcaggtagctaacgatgctgggaatactaccgtgaaaaccaaacgaggtgaaaatcaccggaatagcggacagcgccagcccttgctgtagcggcagagtcaggagatttatctggtgaatatgcggcaggagcagcaccagcatcaccgcgaggaagataattttggcgctgaataaaaagcggttaaacagatcgaccagggaagtccctatgcacaccactgcgccgccaatgccggtaaagagcaatacgccggcagaaggcggtaggttccagttcagccactgattcagactggaggccagcagctccccagcgccgctgatataggccgccgtaagcgcatacatcagaaaaagcatacagaaaccggtgacccattggccgtagcggccgagatagcgcgccgccagtgagcctaaccccatatccgcagggacatgctgatagacttccagcagcagcagggcggtatagcacatcagcgcccacagcgagatcagtaataccagggtgacgccaaaaccgactcccgccgaagcgagcggcatcgccaacataccggcgccaatggtggtgccggcaacgattaaaatactacccagagtgcggttcttcacgcttttctctatctatgaaggaaggaacgaataattatgtcgcgcagagtatgtgaaatgagtgatttcgtcaaatgatggttacaagtggtgtaattaaatatttacacctttgagggggcagaaaagactgcgttggcgcaaagccgccaggcgcatgctgatatatgctgcacgctttacaggaggagttatgtcatctattcacggtcatgaagttctgcagatgatgatcgcatcgggcgagtcgtacagcgttgccagtctcgaagcggccattaagaggcaatttggcgaagatgctcgctttcacacctgttcggcgcaggatctggacgcggcgcagctggtgacgtttttgcagcagaaaggtaaattcattgcggtggaagagggtttcaataccagcgagagtaaaatttgccgtcattaagcgcgcggcggccagggcggccgccgctgtgggaattagttttgcgtgtcgagggttgccagttctttatcgataaagtacaggccttcaccgcttttaccggcaagggtcagtttatcaataacagatttgaataatttttcttcttcatgctgttctgctacataccattgcaggaaattaaaggtcgggtaatcctgattggtcatcgcggcatgcgccagttcattaattttttgcgtaattaactgttcatgttcataggtctggcggaacagttcatccagcgaagcatattcggcaaacggcgagctaatggcgttaatacgcggcaggctgccggtatcggtcaaatagtcgaacaggcgctgcatgtgcgtcatttcttcctgggcgtggcggcggagaaaggcggctgcaccttcaaagctatggtagctgcaccatgcgctcatctgctgataaagcaaagaagaataaagctcaagattcatttgttcattaagtttttcgatcatttctgctttcagcatggcgtccactccggaaataaagattaaatcatagtgtgccgtcactataatttgttagtaatttatttgcaaaaagtaaattaaaaaattaattatcaaaaatgcaaatgggaataaaacgcattggcaatataataataaatgagaatagttttaattcgatatttatttcgtaaattatcgcgggaagagaaactacgaatatcaagtggtgtgaacctggaacggtaggaccgggccgatcgaggctggaaatgtgaagcgctacgtaatttataaaacggcttttcataaagtttgaaaatgcatttatgaagtagtagagtcctggtaacgctaacgaactcgcgggccgctcccgcacagctttcaggagagtgaagcatgaaaatcgcactgatgatggaaaacagccaggccagcaaaaacgccatcattctcaacgagttgaaaaccgttgctgatgagaaaggctttccggtttacaacgtaggaatgagcgatgagcacgatcatcatcttacctatatccatctgggcatcatggccagcatcctgctgaacgctaaagcggtcgatttcgtggtgaccggttgcggcaccggccagggggcgctgatgtccttgaacatccatcccggagtggtctgtggttattgtattgaccctgcggatgccttcctgtttgcccaaatcaacaatggtaacgcgttgtcgctgccttttgctaaaggctttggctggggggcggagctgaacgtacgctttatcttcgagaaggcctttacgggccgtaatggcgagggttatccgccggaacgtaaagagccgcaggtccgcaatgccgggatcctgaataaagtgaaagcggcggtggtgaaagaaaattatcttgataccctgcgggcgatcgatccggaactggtaaaaaccgccgtatccgggccgcggttccagcaatgcttcttcgaaaactgccaggataaagaaatcgaagctttcgtacgccagattattggctaatagggcttttcaaacaggcctgcatcaatacgcgggcctgtttgttatggtcgtgctttactggataccgtgctgccggcatctcgtgtaagtcgcagcgtatcaatcatccctaccaaacaaatcagcgcaataaagacaaacgccaaacggaaatcaattcccggtagagtcgtcaggttaaaccactcgctcaactgttcaccgatgcggatgccgatggcgccgagagtgataccgagcccaaccgccagctgtgaagcggtgctgaacagcgtattggcataactcatctgggcggaaggaacgtcggcaaaagcgagcgtactgacgccggtaaattggaccgagcggaacaccccgccaagatagaggatcaacattatcagccataccggcgtttgcggcgttaacaacgcgcaggcaagtagcgaggcgacattcagcgcaccgttaatcagcaataagcggcgaaaccccaaccagcggatgagcggcgtggttgcgggcttgatagtgagattgccgacgaaaacggccagcaccagcagtccagaatgaaaaggatctatgccgaaacccacctggaatagcaatggaagcaggaacgggacggcgcttatcgaggcgcgaaacagtgaaccgccgtacatggttacccggaatgtaggaacctgcaaagcgtccaaccgtaccattggccaggcggcgcggcggaaatggcgtagagcgaaaaacatacagccgatccccgtcgccaggagcgccggcgtttgccagctttgcggctgctggtcgccgagccgttccatcgctgccaccaggctaatcatggccagtgacgtcgccagaaaaccgggtagatcgaaggggcggcgttcttcttcacggatattgggaatgatgcgtagcgagagcgccatcgccagtagcccgagcggcacgttaataaaaaagatccagtgccagctggcgtaactggtaataaagcccccgagcggcgggccgattatcggtgcgaccaacgccggccaggtcagcgtggctattgccttgatgagctgatctttgggagtggtgcgcaataccgccaggcgcccgacggggaccatcagcgcgccgccgacgccctgtagaatgcgcattgtcacaaagctttcgatgttacgcgataaaccgcagaaaacggaggcgagggtaaaaatggcgagtgccagcgtaaacactttccgcgcgccgaagcggtcggcgatccagccgctggcggggatcagtaccgcgagggtgatcaggtaggcgctgatgccaatattgagcgcgaccgccgctacgccaaaatccttcgccatatcaggcagggcggtagcgatgaccgtaccatcgagaaattccataaagaaagcgccagccaccaataatgccggggcggaaaaagcgcctgtttttggcgtaattgttgttgtacccattgcgtcgttgccatagcaaaatgaataagtatctttgcggtacgttttcttttcgccgctcccgcacatgtttttttatctggtgcgatttaggttactattacgctcctgaaaataggagtaaaaaatgtctcaacctttcactgaacaagatgagttggtttccgatgtcgtcgcatgccagctggtcatcaaacagatccttgatgtgattgacgttatcgccccggtcgaagtgcgcgaaaaaatggcgacgcagttaaaagcgattgactttgcgagtaaccctgcttcggcggatccggtgacgctgcgcgcagtacaaaaagcaattgcactgattgaactgaaatttaccccgcagggtgaagcgcactagctctatctctgagaagttgattgtctggccgttccagtctggaacggccaaattcagttagtgctgttgtggcgagatgagattaagtagtcgacggtctgtctgctccataccgagcccggctttatcagcagtacgtatttcttcaaggacggtttgcagtaaccgcccatcttgctgctgctctttctccagcagggtcaaaaaacgccacgtcgtgtcatcgcgctgcgcttttgcttcctgcgccaggccggacagcatgctgctacgttgctgatactcttcgagagttttggcaaacacttcttcaagcgttgtgcattgcgggggatagctttcgtcggctttgacaattggccaggcgccggcctttttcatatagtcaaaaacctgcatcattaacgtcacgctggattgcgcacgggtgcgcaagaaggttgctgtgccgttgagacgctgctgcgcgcaccattcacctaaatgtagataaacatttgatgcgtgaaactcaagattaatctgggtatttaatttctgaaccattcctggaactgccataacaatatccttatttatccgcaagggaagtatgacgcgctaccatcgcctcgcacaggcgagttttgcaagcgcaacgcaataggcaggaaataaacacggtgcaatccatttgcacgtgactatttatttatatctgccaatacatcaagaatacccttatgtgccgaataagaaaactctcaacatgcgttatttacgatttgttacaacatcagttttactgcttgttttaattgtcttttttgtggatttaaatcgtaatacattgaatttaaatggttatatttaagggttcgtagggctggtaaatttgtattaataaagttgatttaacggtaaattcatatatcgatcatagcttattcattattcgaaaatagcgagaggataatgaacttgtgatagatcatcttttgttggaagtggaagaataacatatatgctggcggcaaatcgcaggacagagtagcccgggatggcgttagcgaacctacaaggataagtctgctggtgatatggattattgtgccacgcataacgctaattgtctgacaattagcgttttttttatgtcattttttgctgaatttatgtacgcaactactgtaattctgcggtgtgatgacgctctcgtatggataaataatttccagttaaaactattttaacaacggcaatattgattgcgatttttctaatgccttgttttaagaccgataaaaaatttaagtccgattttcccctacagaaaagcgaattaaagctggagtttaccatgcacaaatttactaaagcgctggcggccattggcctcgcggcggttatgtcacaatcagctatggctgaaaacctcaagctcggtttcctggtgaagcaaccggaggagccctggttccagaccgagtggaaatttgctgataaagccggtaaggatttgggctttgaggtgattaaaatcgcggtgccagatggtgaaaagacgcttaatgcgatcgacagtctcgccgccagcggcgcgaagggatttgtcatctgcacgccggacccaaaactggggtcggcgattgttgcgaaggctcgcggctatgacatgaaagttatcaccgttgacgatcagtttgtgaatgccaaaggtaagccgatggagagcgtgccgctggtcatgatggccgccagcgaaatcggcgctcgtcaggggcaggaattgtataaagagatgcaaaaacgcggctgggacgtgaaagataccggcgtgatggcgattaccgccgatgaactggatactgcccgacgccgtaccactggctcgattgacgcattgaaagcagcggggttcccggaaaaacagatctatcgtgtaccgaccaaatctaacgacattcctggagcgttcgatgccggtaactccatgttggtgcagcatccgcaggttaagcattggttaatcgtgggtatgaacgataacaccgtgctgggcggcgtacgggcaactgaaggccagggctttaaagcgccggatgttatcggcatcggtattaatggtgttgatgcggtgaacgagctttcgaaagcccagccgacggggttctatggatctctgctgccaagcccggatatccatggctataaaaccagtgagatgctctacaactgggtgaccaaaggcaccgagccgccgaaatttaccgccgtgactgacgtggtgctgattacccgcgacaactttaaacaagagttggcgaagaaagggctgtaaggccgggttcattctgcctcccgctctggcgggaggttatgcgtagaagagcggagtcgttatgcaacaatctatcccttatctctcatttcgcggtatcaccatgacgttcccgggcgttaaagcactgtctgacatcagctttgactgctatcgcgggcagatccacgcgttgatgggtgaaaacggcgccgggaagtccaccctcttaaaaattctcagcggtaactacattccaactgacgggcatctgcaaattgatggtcagcaaatggcatttacgaatactaccgctgcgctaaatgctggcgtagcgattatttatcaggaacttcatctgatcccggaaatgaccgttgccgagaatatctatcttggtcagttgccgcataaaggcggcattgtgaatcggtctttattgaattatgaagcgcggctgcagctggaacatctgggactggatatcgacccggaaacgccgctgaagtatttgtcgatcggccagtggcagatggtggagatcgccaaggcgctggcgcgtaacgcgaagattattgcgtttgatgaaccaaccagctcactctctgcgcgcgaaatcgacaacctttttcgcgtgattcgcgagctgcgtgaagaagggcgagtgattatttacgtctcgcaccgtatggaggaaattttcgccctcagcgatgccattaccgtgtttaaagatggccgctacgtgcggacctttgacgacatgcggctggtggatcacgatgccctcgtgcaggcgatggtggggcgtaatcttggcgatatctatggctggagagcgcgtgaatatggcagcgagcggctgcgactggatcaggttaaagcgccaggtgtcagaatgccaatcagtttatcggtacgcagcggtgaaattgtcggcctgtttggtctggtcggcgccgggcgcagcgaactaatgaaggggctgtttggcggcagtagaattaccagcggtcaggtctatattgatggtcaggcgataagtattcgcaaaccggcgcaggcgattcaggcgggcatgatgctgtgtccggaggatcgtaaagccgagggcatcattccggtacattcggtgcgtgacaacatcaatatcagcgcgcggcgtaagcatattcatgccggctgcctgattaacaatgcctgggaagcgagtaatgccgaacaacatatcaaatcgctcaatatcaaaaccccgggagctgagcagttaattatgaatctctccggtggtaatcagcaaaaagccattctgggccgctggttgtcggaagagatgaaggtgattctgcttgatgaaccgacccgcggcattgatgtcggcgcaaagcatgaaatctacaacgttatctatgcgctggccgcttctggcgtggcggttgtttttgcctccagcgacctgccagaggtgctcggcgtcgccgaccgcatcgtggtgatgcgcgaaggtgaagtggccggtgaattgctgcatgaagatgcgaatgaacagcaggcgctgagccttgcgatgcctaaagtcagccaggccgtagcctgagtaaggagtgaatgatgtcatctgtaactacgccgagcgctgcacgatcctccttcagcttcggtcgaatctgggatcagtttggtatgctggtggtcttcgcagtgttgttcatcggctgtgtgatctttgttcccaactttgcctctttcgtcaatatgaaagggctggggctggcgatttccatgtcgggaatggtggcctgcggcatgttgttctgcctggcctccggggattttgatttgtcagtcgcttcggtcattgcctgcgctggtgtgacgacggcggtagtgattaaccttaccgaaagcttatggattggcattgccgccgggcttttgctgggtgctgtcagcgggttggtaaatggttttgttattgcgcgtttgaagatcaacgcgctgatcacaactctggctaccatgcaaatcgtccgtgggctggcctatattatttccgatggtaaagcggttggcattgaggatgaacgtttcttcactctgggttatgccaactggttggggctgccggcgccaatctggctgacggttgcctgcctgatcgtctttggactgctgctgaataaaaccacctttggccgcaacacgctggccatagggggcaatgaggaggcggcgcgacttgcaggggtgccggttgttcgtaccaagatcatcatctttgttctttcaggtctggtatcggcggcggcggggattatcctggcttcgcgcatgaccagtggccagcctatgacctcaattggttatgaactgattgtgatctcggcatgtgtcctgggcggcgtatcgctaaaaggcgggatcggtaagatctcttatgtggtggccgggatcctaatcctgggtaccgtggagaatgcgatgaacctgctgaatatttcgccattctcacaatatgtagtccgcggggtgatattgctggcagcggttatcttcgaccgatacaagcaaaaagcgaaacgtgcggtttaattgcgcgcaacttttaagtctacatcataatgtgccgccggcgcccgctgcgctggcggtgactatcaaaaatggcgaggctggtcacactgtctatacttacatggctaacaattagttaacaaccagcgtaatgctggccatgataaggaggaacacagggtggctgaccagatatctgtaccgcctgagctaaccggaaaccacgcattttttctggatcttgacggcacgcttgccgatatcaaacctcatcccgatcaggttgttatccccgaagacgtccttcagatgttgcgattactggcacagcgacaacatgatgctgtggcattgatttcagggcgctcactaacagagcttgatgaactaacccgtcactggcgactgccgcttgccggcgtccacggggctgaacgccgcgatatcaatggaaaaaggcacgatgtatcactgccgccggcattgagccgtgaggtcggcgaagcattaacttcggcgctacaggcgctgcctggcagtgaactggaggataaaggcatcgcttttgcgctgcattaccgtcaggcaccacaacaccagagcgccatcctggcgctggcgcaggatatcgtgcagcgttatccgattctggccattcagcaagggaagtgtgtcgttgagatcaaaccacgtggcattaacaaaggtgaagcaatcgccgcgtttatgcgggaagcgccttttgcgggacgaaagccggtatttatcggcgatgacctgactgatgaggcgggttttactatggttaatcaattaggcggagtatcgattaaagttggacaaggcgacacacaggcgcgctggcggctggcgaatgttgccgccgtacatcagtggttacgccatgttgtcggcaatatgcaaagcctggatgtattcactaacgggagggatgaccatgagtcgtttagtcgtagtatctaaccgtattgcaacgccaaatgataaaaaggctagcgcaggcggcctggcggtgggtattttaggtgcgctgaaagcgagcggcggcacgtggtttggttggagtggggaaatcggtgatgatagccagccgttgaagaaggtgagtaaaggggatatttcgtgggcctcattcaaccttagcgaagaagatcacgagctctactacaatcagttttccaatgcggtgctatggcccgcatttcactatcgtctcgacttagtcaattttcagcgtccggcgtgggaggggtatctgcgggttaacgccgccgtggcgcaaaagctgctgccgctgctagccgatgacgatatggtatgggttcatgattatcatctgttgccatttgccagcgaattacgcaaaaacggtgtgaagaaccgcattggtttcttcttacatattccgtttccaacgcctgaaatattcaatgcgttgcccccgcatgccgaactccttgagcagctgtgtgattatgaccttttgggctttcaaaccgaaaacgaccggcaggcgtttgttgactgcgtcgcccaacaaactaccttgtgcgaagtgggtcaccagcaataccgtgcctggggtaagacgttccgtactgccgtctacccgattagcattgagccgcaagaggtcgcacgcagcgccagcggaccattgccgccgaagctggctcagttgaaagctgaactgaaaggggtgaagaatattttttctgttgagcgcctggattactccaaggggttgccagagcgttttcaggcttacgaagcgctgctggaaaactacccccagcatcgtgggaaaattcgctatacccagatagcgcccacttcgcggggggatgtacaggcttatcaggatatccgccaccaactggaaaccgccgcgggacgcatcaacggccactatggccaattgggatggacgccgctgtattacctgaatcagcacttcgatcgcaaactgctcatgaaggtatttcgttattccgacgtgggcctggtcacaccgctacgcgacggcatgaacctcgtggccaaggagtttgtcgccgcgcaggaccctgaaaaccctggggtgttggtgctatcgcagttcgctggcgcggctaatgaactgacttccgcgctcatcgtcaacccctacgatcgcgatgaagtggcggcggcgctggatcgcgcgctaacgatgccgcttgccgagcgaattattcgccatggcaaaatgctcaaggcgatcgagagtaatgatattgataactggcaggcacagttcgttgccgatctaaagcgggtaaagtcgcctgaagatagctgccagcagccaaccgtagttactccctccgcgtagtcaaaacggctgatgcttcggcatcagcttattccagggataccaacagcacatcgactccgctgctgccgacgatattcttcgctgaacaggtagcgcgggaaaacaggctctggttatggttgccgcagatgaccaggtcgacgtgatgctgaaggcaaaaatccttcacgtggtggcaaagttcgccgctggcgatggtcattttgctgatagggtagtccgcctgggaggcgagttcattaagaaaactacgggtctcctcctgcattatctctcgcaaattttccatcatcggcgcggcgaactgattatacatttccggatctgtcgccagcgtaatcaggctgacctgcgcattggacggacgtgcgatagacaccgctttattaaccaacatgcggctttccggcgttggggcgacggcgactaacagatgagagtagggcatctagcctccttgagatacgcaacgggacctttcttccttctttactcctaattccatttttccacaagggttattcgcgcggttaaaaacgcctttttctgatcgtgtggtatcagattctggcagccgactcgcaaaaatgattctctcttttgctttaaaagaaacgctgttttataaatcggtgacgcatgttgcccgcccctttgtttttttgccactgaatgattggtactggcaaaaacgcaaaggtaagccggttttcatgatcttactgtagccatgtatccgcaaaacttcggtatagcccgtggtaagaccgaagttatctaataaaaagagacaggatttacggcgatgaaaacacgaaaaatcggtttggctaattatctcgcctatggttccggcgattttctcggcgcgggaaccaccgcgctgaccgcagcatggctactctatttttacaccaccttctgcgggctatcgcccattgaggcgacgctcattttcgccaccgcgcgcgtgctcgacgcggtcgtcagcccgctgatgggcttcttaaccgataactttggctctacctggctgggtaagcggttcggcagacgcaaattttttattttgctcggtattccctgcgtttttagctactcaatgatgtgggtaggcgatatggggttctggtactacctcgcaacttatctgctgtttgatattgtctataccatgattctggtgccctacgagacgctggtgccggagatgaccgatgatttcaaacagaagaccaaattttccggcgcgcgcatttccatggcgcaaatgtcggcgatattagcctcgtttttaccggggatcctgctcacccaactgggtaaagataacgccagctcatttttttacgcgagcctggtcttttcggtcctgtgcgcgctaatgctgaccttcgtctggtttttcacctgggaacgtccgcgggaagcgtggtctgaagcagcgttacgcgcggaagaagaaaagcgcaacttaacgctcgcgcagagtcttaatcgcctgtttattgagctcagctctacgctgcgaattaaaatcttccgccaacatcttggtatgtatctgggcggttatatcgctcaggacgtgttcaacgccgtgtttacctattacgtggtctttgtgctgatgcaggacgcttctgtcgcctctaacttactcggcacgatggctatcttccagttcatcgcggttatcgccatgatcccgctctgcattcgctttggcccggcgccttcatatcgcatggtagtggtgctgtttggtttgagctctctctcttatgcggtgctctattacgcggggctaagcgacgtctattcattattactgctcatttccgctatcgcgggtctgggacgcggcggcattaactacgtgccgtggaatacttacacctatattgccgatgtcgacgaagtcattaccggccagcgtcgggagggcattttcgccggtattatgacgctgacccgcaaagcgtcgcaggcgggggcggtgatgctggttggcattatcatgcaactatcgggctttgtctccgggcaaaaaattcagccggcaggcgtcagtcataccattctgttgatccttagcgtcggtacgttggtggtgctggcctgcggcttcctggtctccctgcgctttaaactcaatctgcatacgcacagcgtgctccgcgccgagacgctggtgatgcgtgatatcggttacgcacagcccgagcagacgactgccgaaaaccgcgcggtggttgagctgctggcggggatgccttacgactgcctgtggggtaataacaacattggctacctgaatcgcaataaacctgccgccccggcgctgaatcagggcggcactttgaattcgacatataccagaggttaagaacatgaaagtttggccggtcaaacatagcccattactgcgtcagcctgagcgctttatcgctcgcagtgagctgcaggcattgatccgtaatgtgacgcaaaacctggtgaatattaaggatgacaacgggcagtttttacttcggctggacgatgggcgagtcatcgataccaaaggttgggccggttgggagtggacccacggcgttgggctgtacggcatctaccagtattatcaacaaaccggcgataccgcgatgcgcgatatcattgacggctggttcgccgatcgcttcgccgaaggtgcaaccaccaaaaacgttaataccatggcgccgtttctgacgctggcttatcgctatgaagagaccgggcgccaggagtatctaccgtggctcgatggctgggccgagtgggcgatgcatgagatgccgcgcaccgagcaggggggcatgcagcacattaccctggcggaagagaaccatcagcagatgtgggatgacacgctaatgatgacggtgctgccgctagccaaaatcggtaaattactaaatcgtccgcaatacattgaagaagcaacctatcagttcttgctgcatgtacagaacctgatggacaaagagacaggcctgtggttccacggctggaattacgacggtcggcacaactttgcgcgtgcgcgctgggcgcgaggtaacagctggctcactatcgtgatccctgacttccttgagctggtggatttgccagaggggagtgcggtgcgccgctatctgctacaggtactgaatgcgcaaattgccgcgttagcgaaatgtcaggatgagagtgggctctggcataccctgctcgacgatccgcattcctatcttgaagcgtcggcgacggcgggcttcgcttacggcatcctgaaagcgatacgtaagcgttatgtcggggcggagtacaccgaggttgccgaaaaggcgatacgcgggattgtgcgaaatatttcaccagagggggaactgctgcaaacctcgtttggtaccgggatgggctccgatctcgatttttaccggcaaattccgctcacctctatgccgtacggccaggcgatggcgattctttgtctgacggagtatctgcgcaaatatttctgatagcggcatagattccccggccgcgttgcgcgtaccggggcgactaataaaacaaacccggctttcaccgggtttgttttttacatccgctctacggtctcaatacccagagtatcgaggcccaacttcagcgtcttcgccgtcagcagcgccagtttcaggcggctattacgggcctcttcgctttcggcgctgaggatcgggcagtgttcgtagaaaccagagaacagaccggccagatcgtacaggtaggcgcacattacgtgcggagtaccttcacgggcgacgacggccagcgtttcttcgaactgcagcaggcgggcagccaactgcgcttcgcgatcttcactaataactaccggcgcggcagccagcgcgctttcgtcgataccggctttacggaacaccgacagcacacgggtataggcatactgcatgtaaggcgcggtattaccttcgaacgccagcatgttgtcccagtcgaaaatgtaatcggtagtgcggtttttcgacagatcggcatatttcaccgcgccgatacccaccgcattggccagtttttccagctcatcggccggcatatccgggttcttctcggccaccaggcggcgtgcgcgctccagcgcttcgtccagcagatcggccagtttgacggtaccgccggcgcgtgttttgaatggtttaccgtctttacctagcatcatgccgaacatgtgatgttccagcggtacggattccggtacatagccggctttacggacgatagtccatgcctgcatcagatgctgatgctgacgagagtcgatgtagtagagcacgcggtcggcatgcagcgtttcataacggtattttgcgcaggcgatatcggtagtcgtgtagaggtagccgccatcctttttctggatgatgacgcccatcggttcgccttctttgtttttgtattcatcaaggaagaccacggtcgcgccttcgctctcgacggccatgccttttgctttaagatcggcaacgatccccggcagcatcgggttgtacagactttcacccatcacatcatcgcgggtcagggtgacattcaggcgatcgtaggtgatctggttttgcgacatggtgatgtcgaccagtttgcgccacatctgcaggaagtactcgtcgccgccctgcagcttaaccacgtagctacgcgcgcgctcggcgaacgcttcgtcttcgtcatagtgttttttcgcttcgcggtagaaaccttcgaggtcggccagcgccatttcgccggcgttttcctgctgctgcttttccagataagcgatcagcatcccgaactgggtaccccagtcaccgacgtggttggcgcggataacgcgatggccgaggaattccagagtacgtaccgaggcatcgccgatgatggttgaacgcagatggccgacgtgcatctctttcgccacgttcggcgcggagtagtcaacaacgatggtctgcggctgtggtttcgccacgcccaagcgctcggactgaagcgcgagattgacgttgtccgccaggaaggctggatcgaggaaaatattgataaagcccggtccggcgatttcgactttattggcaatgccgttcagatcgagatgagacagtacctgctctgcaagttgtcgcggcgccatgcccagttttttggccaccgccatcacgccattggcctgatagtcgccgaactgaacttttgctgactggcggacctgaggttcgcaatcggcaggcgcgcctgccgcgatcagggcctggctgactttttctgagagaagagcctgaatattcaccggaataccttacttttaaggcgcgagaacccctgtggggcggcgccggaacatggacaaattaaggcgggagtatactgcatttgcgccccgtcgtcagcaccacacgcaagttgccgggcagcacgcttaatcaataaccattcgttgtttcggcgcgcggattggcggttggtcggggcggcgaaacaggataaattagcctttttagcgatcaccgaggcgcaagatggcgaactggcagcaaattgatgaactgaatgatatttcggcggatttaccgcgttttagcgatgcgctgcaagcgctggccgaacggttgggattggagcttgcgccgctggacgccgaccatatttctctgcgttgtcatcaaaatacgacggcggagcgctggcggcaggggctggagcgttgcggcacgttactatcggaaaatatcattaatggccgccccatttgcttatttaagcttgccgaacctatctgtgtcgcccactggcgctttacggttgtggagttgccctggccgggtgaaaaacgttacccgcacgaaggctgggaacatatcgaaatcgttctgccgggtgacccggaaaccctcaacgctcgcgccctggccttgctttccgatgatggactcagccagccggggattttcgtgaaaaccagttcgccgaaaggggagcgtgaacgtttgccgaacccgacgctggcggtcacggacggcaaagtgaccattaaattccacccctggtcgatcgagcaaatcgtcgccagcgagcgatccgatacttaacagtgtgaagccgcgcggcgtctgcggggaaaaatcgtgacatgctgtgttgcccgtgatgaaaatggagaaggaatcgatgttactggaagtttgctgctatagcatggaatgcgcgctggaggcgcagcgttgcggcgccgatcgcattgaactttgcgccgcgccgcaggagggcgggttaacgccgtcgttgggcgtgctgcgttcggtgcgaaacaatatctcgattccggttcatccgattatccgtccgcgcggcggcgatttttgttacaccgacggcgagtttgccgccatgctggatgatgtagcgacggtcagagatctgggttttgcaggcctggtgatcggcgtactcgatgctgacggccaggtggatatcccccgcatgcaaaaaattatggcggcggcggggccgctggcggtgaccttccaccgggcctttgatatgtgcgccgacccgcgtcaggcatggcattcgcttgctgaactgggggttgcgcgtatcctcacttctggacaacggccaacggcggagcaaggtcttgcaaaaattatggaactaattgcgctgggcgatactccaatcattatggccggagcgggagtgcgggctgccaatctgcaaaagtttctgcaggcaggcctcaaagaggtgcatagctcagcggggcagtggttgccatcgccgatgcgctttcgtaatccggggttatcgatgtccaccgacgcagatgccgatgaatattgccgctatgccgttaacggcgaggcagtggcggaaatgaaacaaattatttcagctgcgcgggattagcccgcgaagctaaccgttttttgctgcacatcatgtcgcccaatatgatgattgcccgtaccaggcccctgcaatttcaacaggggcctttttttatcccgcgagcgtcagtagtcgctcgaggtcaattacgctctggccgcggctgcttttttcgccagtgactgctgcgtctctggtttagtggcgacgatcaccgcgcgcagcggcgcgggataaccttccagcgttttgctgctgtcatgtggatcgaggaagtcggcgagtgattccgtcgtcatccattcggtgcggcgctgctcttcgctggtggtgacgcaggtatcaacaatgcgcacatcgatgaatccgcacttctccagccactgttttagcgcggcggcggaaggaatgaaataaacgttacgcatttgcgcgtagcggtcgccgggcaccagcacggtgttctcatcaccttcaatgaccagcgtctccagtaccagctcgccgccgggggctaactgatctttgagctgccacagatgatccagcggggaacggcggtgatagagcacacccatcgaaaagacggtatcaaaggcttccagcgccggcagttgttcgatgcctagcggcagcaggtgcgcgcgctgatcgttgccgatgagtttgcgtaccgcttcaaactggcataagaacagctgcgttgggtcgataccgaccgccagatgcgcgccggcgccaatcatccgccacatgtgataaccactgccgcagccgacatcgaggatagtacgaccggtgagatcggaaagatgcggcagcacgcgttcccatttcaggtcggaacgccattcggtatcgatattaatgccatacagcgaataagggcctttacgccacggcatcaggtttcgcagcagattctcaattcgcagctggtggccttcgctgagtggcgtttcgctttccgccgtgacgctatgcaatagatcgagacgccagggcgccagctcgggcagaaactcaacggcgcgttcccattcgcgaaacttgccgtgcagcgcttcgcgttgccaggccgcgacctgagcgggcagcgtttccagccagtgggagagcggtcctttcgcgatcaactgataaaaattactgaagtcgatcatgcccgttcctcggatttaaccgccaccaatgaaccaaaattaaagcactggaaccacagttcggcatgttcaaaccccgcctggcgcagtcgtgctttgtgggtttccactgaatccgtcagcatgacgttttccagcatgctgcgcttctggctgatttccagttcgctatagccattggcgcgtttgaagtcatggtgcatgttaaacagcagttcgccgacgttggcatcttcaaagctgaatttttcggaaagcaccagcgcgccgcccggattgagcccttgatagactttatccaggatcgcctgacgttcgctcggctcgaggaactgaatagtgaagttcagcacgaccatggaggcattttcaatggcgatatggcgaatatcgccctcaataacctcaaccggcgtcggcgctttataggcatcaatatgacgacggcagcgttctaccatcgccggggagttatcaatggcgataattttgcatcccggatgcgcgatattgcgacgcacggaaagcgtcgcggcgccgagcgagcagccgagatcgtaaacctgagtgtttggctgaacaaaacgctcagccagcatgccgatcatcgaaataatattggagtaaccaggaacagagcgctggatcatatccgggaagacttcggctacccgttcatcaaaggtccagtcgccgagactggcgatcggcgcggaaaaaagcgtgtcgcggtgagacataacgttaaacccgaaaaaacgaaaacggcgtattgtgcgctaacgcagggagaaaaccaactcccagggcatataccacaggttagccagcaccatcagcaacagcgagcaccaggtggcgctcattccggaacgccgccagcggaacaggcgatgatggaaaccgtacgagtgcatcaggcgtccggcaatcagcaaaataccgcaaacgtgcaccatccaggttagcgcgccgttcatttccatgaacaacagcagaatgagcccaatggggacgtattccaccgcattgccatgaacgcgaatagcgacctgtagttcgctaaaaccaccgtcgccatagccgacgcgatactgcatgcgcagacgtaccacgtcgaaggaaaacttgattaacaataacgcacccaaaaccgcatacagcgcgctgaccatacccaaaactccctttaattatgtcaggtggctccgactatcatagcaggatatcagaaaagcgaggattgctgcggaattgacggcgcggcgccgacgcccggcagcaccgcacgtaaatcttcccatagcgtatccaccagttcaggcgcctgggcgatatccggggtatgtagaaacagccatggcgtggctgactgatgccactttggcagcgtctgtaaccagacgcgaaataattcgcgattctgcgccatatcgtcgctgccgataaaacgcaccatcggctgctccgcggtcatgaccgcgtgaaccggaactttgggtttctttttttgcgcgtcaatcatcgccgggttgcgcgcgacggcgctatgtaccgggcggctatcgaggatcacgcggttggcgttgcgctggtgcaagccacgattaagctgttgttcagcatcgcctttggcgaaaaactcaggatggcgaacttcaacgccgtaggtgaagtttttcggtagcgtatcgagaaactgccacagggcagggaggtcgcgcgggccgaaggtggcgggcaactgaagccagtactggccgatgcgcgattccagcggcgccagacgagtaaaaaattcgtggcttaagtcgtcgcagtcgcgcagcgccgcctgatgcgaaatcgtggccgggaatttaaaacagaagcgaaaatcatcgtgagtttgttgataccagcgatcgactatctcggcctttggtaaggcatacagggtggtattaccctccacgcagttaaaatggcgggcatactcttcaaggccggtgatgccaaggcgcacccatttagggtgcgaccattgcgggagcccgatataaatcataaggcggcgagaatgtcctcagtgctgcgcacgcgggcgatgcgcgggaagatatgggtcatactgccctgatgctgttcggcggaggcggcgctgcatgcatcctcggcgatgaccagactgaaacccagttcccaggcattgcgggcggtggattccacgccgatattggtggagataccgcaaagaataatggtgtcgataccgcggcggcgaagctgcagttcaagatcggtgccgtagaacgcgccccactggcgtttcgagacttcgatatcgctatcctgtttgccgagcgccggcggatagacccaccagttttcaggtaattttacggcgccagtctgggcatctaccggctgttttaacgcttcggcgaaatcggcggaccagcccactcgaaccatgatgacgggcgaaccctgttgacgacatttttcagccagctttgccgcgcgcgtcaccacctcgtcggcgcggtgcggaccgccggcaaaaggtaaaatgccttcttgcaggtcaataatgaccagcgcggtctttttcgcattgagttctaacatggtatccccatatcttgttctgttgtcaggccgctacaataccgttgctaattcagctcaagggtaacaaattttgttaatttatgtgagcacaagcaataagcgcgcagcaaagcagcgtacaaactgcgtcgggcttatcgtcagacagaatttccagtataatagccgccttttttcattcagtagtgacattcagcaaagctgcgacctcgtcgcctgcaaggcaggcaacatccgcctgcggctaagttaagggatatctcatgcgtacagaatattgcggacagctacgtcagtcccacgtggggcagcaagtgaccctgtgtggttgggtcaaccgtcgtcgtgatctcggtagccttatcttcatcgatatgcgcgaccgtgaaggcatcgtgcaggtgtttttcgatccggatcgtgcggatgcattaaaactggcttccgaactgcgtaatgagttctgcatccaaatcaccggcaccgtgcgcgcgcgtgaagagcgcaacgttaaccgcgagatggccaccggcgaaatcgaagttctggcgtctgacctgaccatcatcaaccgcgcggaagcgctgccgctggactccaaccacgtcaacaccgaagaagcgcgcctgaaataccgctatcttgacctgcgtcgtccggaaatggctcagcgcctgaaaacccgcgccaaaatcaccagcttcgtgcgccgcttcatggacgatcacgggttcctcgatatcgaaaccccgatgctgaccaaagctacgccggaaggcgcgcgtgactatctggtgccgtcgcgcgtccataaaggtaaattctacgcgctgccgcagtctccgcagctgttcaaacagctactgatgatgtccggcttcgatcgttactatcagatagtcaaatgcttccgcgacgaagacctgcgtgccgaccgtcagcctgaatttacccagattgatgttgaaacctcgttcatgaccgcgccgcaggtgcgtgaagtgatggaagatctggtacgtaagctgtggcaggacgtgaagggcgtagacctcggtcaattcccggtgatgacttttgccgaagcggagcgtcgttacggttccgataaaccggacctgcgtaacccgatggaactggtagacgtagccgatctggtgaaagcagtagaattcgccgtcttctccggcccggctaacgacgccaaaggccgcgttgctgccttacgcgtaccgggcggtgcggcgctgacccgtaaacagattgatgaatacggcaaattcgtgcagatctacggtgcgaaagggttggcctatattaaagtgaccgagcgtgcgaagggccttgaaggcatcaatagcccggtggcgaaattcctcaacgccgaaatcgtggaagctatccttgagcgcaccggcgcgcaggacggcgacatgatcttcttcggcgctgacaacaagaaagtggttgctgatgccctcggcgcgctgcgtctgaagctgggcaaagacctgaatctcaccgacgagaacaaatgggcgccgctgtgggttatcgacttcccaatgttcgaagacgacggtgaaggcggcctgaccgcgatgcaccacccgttcacctcgccgaaagatatgaccgccgctgagctgaaagccgcgccggaagatgctgtggctaacgcctacgacatggtcatcaatggctacgaagtcggtggtggttcggtgcgtatccacagcggtgaaatgcagcaaaccgtgtttggtattctgggcattaacgaacaagaacagcgtgaaaaattcggcttcctgctggatgcgctgaaatacggtaccccgccgcacgccggcctggcgtttggcctcgatcgcctgaccatgctgctgaccggtaccgataacatccgtgacgttatcgccttcccgaaaaccacggctgccgcgtgcctgatgaccgaagcgccgagcttcgcgaatcctgccgcgttaggcgaactggggattcaggttgtggcgaaagaggcaaaagagtctccggagaacaactaagatgtcattcaagctgcccgtctccgttctggtggtgatttacgccgaagatacgaagcgggtgctgatgttgcagcgacgcgacgatcccgctttctggcagtcggttaccggcagcctggaagagggggaaaccgcgttgcaggccgccgcgcgcgaagtaaaggaagaggtcgccattgacgttgctcgcgagcaactggccttaattgactgtcagcgtacggtggagttcgagatattttctcacttacgtcatcgctatgcgccgggcgtcgagcgcaatacggaattctggttccgtcttgcgctgccccatgagcgccagattgttttcactgaacatctggattaccgctgggttagcgcgtcggatgccgccgcgctaactaaatcgtggagcaaccggcaggcgattgaagaatttgtaattaacgccgggtaacttcccgcggcgtttgccgcggaaagacggcttttttggagagttttttatggcaggtcatagtaaatgggccaacaccaaacaccgcaaagcggcgcaagatgccaagcgcggtaagatctttactaaaatcattcgcgagctggtcaccgctgcgcgtctgggcggcggcgatccggcatccaacccgcgtctgcgcgcggcggtagataaagcgctgtccaacaacatgactcgcgacaccctgaaccgcgccatcgcgcgcggcgtcggcggtgatgaagacgcgaacatggaaaccatcatttatgaaggttacggcccgggcggcaccgcggtaatggttgaatgtcttagcgacaaccgtaaccgtaccgtagccgaagtgcgccacgcctttaccaaaaccggtggtaacctcggaaccgacggttctgtggcctatctgttcagcaaaaaaggcgtgatctccttcgagaaaggcgacgaagacaccatcatggaagccgcgctggaagcgggtgctgaagacgttgtcacctatgatgacggcgccattgacgtttacaccgcctgggaagagatgggcgcggtacgtgatgcgctggaagccgcaggcctgaaagccgatgctgctgaagtctcaatgatcccgtcgactaaagcggatatggatgcggaaaccgcgccgaagctgctgcgtcttattgatatgctggaagactgcgacgacgtgcaggaagtgtatcataacggcgaaatctccgatgaggttgccgcaacgctgtgatgccggtagccggtattgcgggtgagttattactggaggcgcgtgatggccattattctcggcattgacccggggtcacgcgtgaccggttatggcgtgattcgccaggtcggacggcagttgagctaccttggcagcggatgtatccgcaccaaagtagacgatctgccgtcgcggctgaagctgatatacgccggcgtcaccgaaattattacccagttccagcccgactatttcgctatcgagcaggtctttatggcgaaaaatgccgattcggcgttgaagcttgggcaggcgcgcggagtggcgattgtcgcggcgacgaaccaggacctgccggtttttgagtacgcggctcgccaggttaagcaaaccgtcgtcggtatcggtagcgcggaaaagagccaggtacagcatatggtgcgtactttgctgaaacttccggcaaatccgcaggcggatgcggcggatgcattggccatcgccatcacccattgccacctcagtcagaacctggctcagattagcgagacccggctcaatctggcgcgagggcggttacgataatcacaaatcaggctggatattcatccagcctttttttatgataacgcattagactttcggccctttattcaggagcgctacgtgataggcagactcagaggcatcattctcgaaaagcaacccccgctggtattactggaaaccgggggcgtaggttatgaagttcatatgccgatgacctgcttctacgagctaccggaagccgggcaggaagccatcgtcttcacccattttgtggtacgcgaagacgcgcagctgctgtacggctttaacaacaagcaggaacgcaccctgtttaaagagcttatcaaaaccaacggcgtcgggccgaagctggcgctggctatcctttccggcatgtcggcgcagcagtttgtgaacgccgttgagcgtgaagaagtcgcctcgctggtgaaactgccgggtatcggcaagaaaaccgccgagcgtttaatcgtcgagatgaaagatcgcttcaaaggcctgcatggcgacctgtttactccggccgccgatctggtgctgaccacgcctgccggcccaactgccgacgacgcggagcaagaagcggttgccgcgctggtggcgctgggctataaaccacaagaggccagccggatggtgagcaaaatcgcccgtccggatgctaacagtgaaacgctaatccgcgaagcgctgcgcgcggcgttgtgaggtaagggatgattgaagcagatcggctggtatcaggcgacagcattggtttcgaagaggccgctgaccgcgctatccgccccaaattgctcgcagagtacgtcggccagccgcaggtgcgttcgcagatggagatctttatccaggcggcgaaactgcgtggcgatgcgctcgatcacctgttaatttttggcccgccagggttggggaaaaccacgcttgccaatatcgttgccaacgaaatgggcgtgaatctgcgtaccacctccggcccggtgctggaaaaggctggcgacctggcggcaatgctgaccaaccttgagccgcatgatgtcctgtttattgatgaaatccaccgcctttcaccggtagtggaagaggtgctgtatccggcgatggaagattaccagctggatatcatgattggcgaaggcccggccgcgcgctcgattaaaatcgatctgccgccgtttaccctgattggcgccaccacccgcgccggctcattgacttcgccgctgcgcgaccgctttggtatcgtacagcgcctcgagttttatcaggtgccggacctgcagcacattgttggccgtagcgcccgtcatatggggctggagatgagcgaagaaggggcgctggaagtcgcccgtcgcgcgcgcggtacgccgcgtatcgccaaccgcctgctgcgccgggtgcgcgactttgccgaagtgcgtcacgatggcactatctccgctgagatcgccgctcaggcgctggatatgctcaacgtggatgccgaagggtttgattatatggatcgcaagctgctattggcggtgatcgataaattcttcggtggtccggtcggcctcgataacctcgcggcggctatcggcgaggagcgggaaaccattgaagacgtgctggagccgtacttaattcagcaggggttcctgcagcgcacgccgcgtggccgaatggcgacggtgcgcgcctggaatcacttcggtattaccccgccggaaatgccctgatgaaacccggtagctttgcgctaccgggtagcctctcaatcaactcgccgttttcttcatcatactcagaacaaacagcgccgctgcgcacagcacaaccgaaggccctgctggggtatcgtagaacgccgagaaggttaatcccccggttaccgccagcatacccacgccaacggctaccgcggccatctgttccggcgtgcgggcaaagcggcgggcggtagcggccgggattatcaacagcgaagtgatgatcagcgcgccgacgaatttcattgccacgccgatagtcaatgccgtcaccagcatcagcagcagcttaacccgctgtaacttcacgccgtcaacaaacgctaaatcagggctgatggtcatcgccagcaggttacgccactgccagagcaatatcgcgaccaccaccactacgcctgatgcaatggagattaaatcctgtggagtaacggctaatagatcgccaaacagataggccatcaggtcgacgcgcacgttcgacatcaggctcaccaccaccagaccgagcgacagcgcgctgtgggccataatacccagcagggtatcgaccgccaggtgagggcgtttttccagccacaccaggccgcccgccagcagcagcgtgaccacgataaccgcataaaacggattcacgttgagcagcagcccaaacgccaccccaagcagcgaagcatgcgccagcgtatcgccaaagtaggacattctccgccagaccacgaacgaacccagggggcccgccgcgcaggcaagcatcatgccggctaaccagccgggtaacagtaattcaatcattagcggccatttccccgacgcagtacaatccgcccctgcaggtcgtggcggtgattatgttggtgacgataaatccccagctgttccgcgccgcgcgggccgaacatggagataaattccgggtgcatcgagaccacttccggagttccggagcagcaaatatgctggttcaggcacagcacttcatcggttttggccatcaccaggtggagatcgtgggaaaccattaagaccgcgcagttcagctcctgacgcagttgattaattaaatcatacagcgctacctgcccattaacgtcgacgccctgggtaggttcatccagcaccagcagttgtggctgatttaacagggcccgcgccagcaacacgcgctgggtttcgccgccggagagtttttgcattggcgcatcgataagatgcccggcctgcacgcgctgcagcgccggcataataacctgcttgcgcgtacctggacgcaggcgcataaagcggctgaccgtcagcggcatagtagcatcaagatgcagtttttgtggtacgtagccgatacgcagatttttctcgcgctggatagcaccttcggtcggcgtcaccaggccgagcactacgcgtaccagcgtcgatttcccggcgccgttcgggccaagaagcgttaaaattttgcctggttttagcgttagcgaaatgtcagacaacacgcgccgctggccgtagacgaccgcgactttttccagcgttacaagattcgtcatgtcaaattaggggttgcactagcgattgaatgttataatatcacatcactttcgctcattacgatgattagtcgcattatgttacataaaaatacgcttctttgcgctgcacttagcgccgcttttttgttcgctcatgccccggtagctaatgccgccgtcgtcgcttccatgaaaccccttggctttatcgcttccgctatcgccgatggcgtgacggagactcaggtgttattgcctgacggggcttccgagcatgattattcactacgcccgtctgatgtaaaacgcttacagaacgcagacttagtggtatggattggtccagaaatggaagcattcatggacaagtcaacgcaaagcattgcggagcagaaaaaggtcaccatcgcccagttggatggggtgaaaccgttgctcatcaaagggacggatgatgacgatgacgaacatggtcacgaacatgctaatggcgaaaaaagtgacggcgatcaccatcacggcatttacaatatgcatctgtggctctccccagagatagcgcggctctcagcggttgcaatccacgataaattattggaacttatgccgcagagtcgagccaaacttgacgccaacctgaaggaatttgaggcaaaattagccgcaaccgacaaacaggtgagtaacgagctggcgccggtgaaaggtaaggggtatttcgtttttcatgatgcctatggctactacgaaaaacattacggtttgacctcattgggacattttaccgtcaaccctgaaatccagcctggtgcgcagcgtttacacgaaataagaacacagttggttgagcaaaaagcgacttgcgtttttgctgagccacaattcaggccagcggtcatcgaagctgttgccagggggacctccgtgcgcatgggaaccctggatccacttggaatcggaattaagctgggtaaagacagttaccctcagttcctgagccagttggggcatcagtattcaagctgcctgaaaggagattaacgaggaagtgaatacgtgcaacagatagcccgcgctgtcactcaggcattcaacaatctgccgcgaccccatcgcgttatgctggggtcgttgagcgttctaacgttagcggtcgccgtctggcggccctacatctaccacccggaatcagccccgatagtcagaacgattgagctggaaaaaagcgaaatccgctctctgctgccggaagcttccgaacccatcgatcaggcgccgcaggaagaagaagctatcccgcaggatgagctcgatgacaaatccgatagcgactccggcggccatgaatatgtggtttctaccggcgatacgctgagcagtattcttaatcagtacggtattgatatgggcgatatcgctcaactctcctctgctgacaaagagctgcgtaatctgaaaattggtcaacagctctcctggacgctaaccgctgatggcgatctacaaagcttgacgtgggagatgtcgcgccgtgagacgcgtacttataaccgcgtcgccaatggttttaaaatgagcagcgagctgcagaaaggggattgggtcaacaacgtcctgaaaggcaccgttggcgccagcttcgtctccagcgcccgtgatgctggccttaccagctcggaaatcagcgcggtcatcaaagcgatgcagtggcagatggacttccgtaagctgaaaaaaggcgatgaattctcggtcctgatgtcgcgtgaaatgcttgatggcaagcgcgagcagagccagctgttaggcgtgcgtttacgttccgatggcaaagactattacgcgatccgcgccgaagatggcaaattctacgatcgcaacggtacgggcctggcgaagggcttcctgcgcttcccgacctcgcgtcagttccgcgtgtcgtctaacttcaacccgcgtcgcctgaatccagtgaccgggcgcgtcgcgccgcatcgcggcgttgacttcgctatgccgcagggcacgccggtgctttccgtcggcgatggtgaagtggtggtggcgaaacgcagcggcgcggcaggctactatgttgccgtgcgtcatggccgaacctataccacccgctatatgcacctacgcaagctgctggtgaaaccggggcagaaagtgaaacgcggcgatcgtatcgcgctgtcgggcaataccgggcgttctactggcccgcacctgcactatgaagtctggattaaccagcaggcggttaatccgctgacggcgaaactgccgcgtaccgaaggcttaaccggttccgatcgtaccgattatctggcgcaggccaaagaggttatcccgcaactgcgctttgattagcctgaataatcattacagaaagccggcgtccgtaatgcgccggctttttcttttgtgcgatgagtgacgtatcgctaaactaagccattatctttattgattgagcagaccttctgcggaccgggcatggaaacgaaaaaaaataacatttgatttatccccaaatttgagaaatcttttttactgccgcgctattggggcgcgtggttaggcgtttttcgccttccccggtattgccctcacccctccctctttccgcgatcctattctcggcaaactggggcgtttcgttgggcgtctggcaaagagctcgcgccgtcgggcgcagattaacctgttgtactgcttcccggaaaaaagcgagcaagagcgtgaagcgatcatcgatgcaatgtatatgtcggctccgcaggcaatggtgatgatggccgaactcggcatgcgcgatccgcaacgcgtgatgtcccgcgttgactggcaagggaaagagatcatcgacgagctgcagcgtaataatgaaaaggtcatctttttagtgccgcacgcctggggcgtggatattccggcgatgctgatggcttcgggcgggcaaaaaatggcggcgatgttccataaccaggggaatccggtatttgactatgtctggaacaccgtgcgccgtcgtttcggcgggcggatgcacgcgcgtaacgatggtatcaagccatttattcaatcggttcgccagggatactggggctattatctgcccgaccaggatcacggcgccgagcatagcgaatttgtcgatttcttcgcgacttataaagcgactcttccggcgattggtcgtttgatgaaagtctgccgcgcgcgcgtagtaccgctgttcccggtgtatgacggtaaaacgcatcgcctgacggtgctggtgcgcccgccgatggacgatctgctggaagctgatgatacgacgattgcgcgccgtatgaacgaagaggttgagattttcgtcaggccgcatcctgagcagtatacctggatcctgaaactgctgaagacgcgtaagccgggcgaaaccgagccttacaagcgcaacgaactatttccgaagaagtaagctgtatgctgcgctgagcagggctacggcgcctgcatttaccagaccgtaggccggataaggcgcagccgccatccggcgcaaaagcggctctttatccgcggatattgcccggcggcgctgtgcttgcgcgggcctacaaaacatttccgtatgctaccatcgccggcatgttgtgatgcctgtatttaccaggataacaagcataaaaaagcctccgtaaggaggctttcccatcactgaaggcgattactcaacggtcaggatacgggtggtgttggtgctgccgatggtgctcatcacgtcgccctgggtgacgaccaccaggtcgccggagaccagatagcctttatcacgcagcaggttaaccgcgtcgtgcgcggcggcaacgccgtcgttatggctgtcgaaatgaaccggagtcacgccacgatagagcgccgtcaggttcagagtacgctcgtgacgggagagggcgaaaattggcaggccggagctgatacgtgaagtcatcaacgcggtgcggccggactcggtcatggtgataatcgcggtaatacctttcaggtggttggccgcatacatcgccgacatggcaatcgcttcttcgacattgtcgaactggacgtcaagacggtgtttggaaacgttgagacttgggatcttctccgcgcccaggcacacccgcgccatcgcggcgacggtttctgacggatactggccggcagcggtttctgcggagagcatcacggcatcggtaccgtccagtacggcgttcgccacgtccatgacttccgcgcgggtcggcatcggattggtaatcattgattccatcatctgcgtggcggtgatgaccgagcgattaagctggcgagcgcggcggatcagcgccttctggatacccaccaattccggatcgccgatttccacaccgagatcgccgcgagctaccatcaccacatcggaggcgagaataacgtcgtccatggcgtcctggtcgcagaccgcttccgcacgctcgactttagcgacgattttcgcatcgcagccagcgtcacgggccagacggcgagcgtagttcaggtcttcgccgcagcgcgggaaggagaccgccaggtaatcaacgccaatttttgcggcggtaacgatatcggctttgtctttatcggttaacgcttctgcagacagcccgccgccgagtttgttgatacctttattgttagatagcgggccaccaacggtaacttcggtgaaaactttcatcccctgtacttccaggaccttcaactgcacgcgtccatcgtcgagcagcaggatatcgcctggaacgacgtccgccggcaggcctttatagtcgatgccgactttttctttatcgccttcgcctttgcccaggttggcgtcgagcaggaatttgtcgccaatgttgaggaaaattttgccttctttgaaggtagagacgcggattttcggcccctgcaggtcgccgagaatcgcaacgtgacggcccagttttgctgcaatttcacggactttgtctgcgcggagctggtgatcttccggggtaccgtgagagaagttcatgcgtacgacgttagcgcccgcggcgataactttttcgaggttgttatcgcggtcagttgctgggcctaaggtcgttacgattttggttctgcgaagccttctggacatgtaatactccgttgactgaaacaactttggtgttgcgtgaacatggattcggtagcgccaaattcgctaacgggcggaactgctacgctaccgggacataattggtctctgacttataatgactattattgtttatcactactaatgagtagttctttatcaaagcgcgattccttcagcgcttccttgaccctcttcaagttatctctgaattttgctccacggcgcagggtaaagccggtcgccagcacatcaatcaccgtgagctgggccaggcgcgacaccatcggcatataaatatcggtgtcttccggaacatccagggtaatggccagcgtcgactcccgcgccagcggggtcccggctgaagtgatggcaatgaccatggcatcgttttcacgcgctaactgcgccagttcaaccaggcttttggtgcgtccggtatgtgaaatgatgaccaccacgtcatcatcgttacaattcatacagctcatgcgctgcaggacaatatcgtcggagtagatgaccgggacgttaaaacggaaaaatttattcatcgcgtcatgcgcgacggctgctgaagaccccaggccgaagaaggaaattttcttcgcctgggtaagtagatccactgcccggttgaccgcggacatatccagcgcatgatgtacctgatcgaggctggccatcgccgattcgaaaattttcgccgtataggattcgacgctgtcgtcttcatcgacattacggttaacatagagggtaccgtgtgccagactttgcgccaggtgcagtttaaaatcggggaacccccgggtttccaggctgcgacaaaatcggtttacggtcggctcgctgacgccggcttccagcgcgagggccgctatgcttgagtgaatggcctgcgccggtgtggcaagaatgacttccgccactttgcgttcagatttgctaaggttttccagtcgggactggattttttccagcatgttcattgtttacaggcgctcatcaatggaaacgatttcattaatgggtgaaatcatcaggcgttttagcaagaatatacccctccgcaatcagaagcggtgaggaatgacgagaaaaaatgtcgttttttttcattacatgatcagagtcgtattttactaactgaaaaccagacgaaacaacgaacattcttagcctgatgcccaatttgtcggcgaacgcttttcctctatgtgcggtaacgtcgggaaagcaccgccaagggtttcaggaaattcgtaaacacagtacagtgcagcgtaagaaaattacaaatttagcctggcataagcaccagactatcaactgaggagaatgacatggcggtaacgcaaacggcccaggcatgcgatctggtcattttcggcgcgaaaggtgacctcgcgcgccgtaaactgttgccttccctgtatcagcttgaaaaagctggccagattaaccctgaaacccgcatcatcggcgtcggtcgcgctgattgggataaagacgcttacaccaaagttgtgcgtgaagcgttagaaaccttcatgaaagagaaaatcgacgaaggtttatgggataccctgagcggtcgtctggacttctgtaatcttgatgtcaacgataccagcggttttacgcgtctgggcgatatgctggatcaggaaaaccgcgtcaccattaactacttcgcgatgccgccaagcacgttcggcgctatctgcaaaggcctgggcgaagcgaagctgaatgccaagccggcgcgtgtggtgatggaaaaaccgctcggtacctcgctggaaacctcccgggaaattaatgaccaggtgggcgagtatttcgaagagtgccaggtttaccgtatcgaccattatctgggtaaagagacggtactgaacctgctggcgctgcgctttgctaactccctgtttgtgaataactgggactgccgcaccattgaccatgttgaaatcaccgtggcggaagaagtgggtattgaaggccgctggggttatttcgatcaagccgggcagatgcgcgacatgatccagaaccatttgctgcagatcctgtgcatgatcgccatgtcgccgccgtcggatctgactgccgacagcatccgcgatgaaaaagtgaaagtgctgaaatcgctgcgccgtatcgatcgctcgaacgtgcgtgagaaaaccgtccgcggtcagtacaccgccgggttcgcgcaaggtaaaaaagtaccgggctatctggaagaagagggcgctaacaaatccagcaacacggagaccttcgtagccattcgcgtggatatcgataactggcgttgggctggggtgccgttctacctgcgtaccggtaaacgcctgccgacgaaatgctccgaagtggtggtgtacttcaaaacgccggaactgaacctgttcaaagagacctggcaggagctgccgcagaataaattgaccattcgtctgcagccggatgaaggtgtggatattcaggtgcttaacaaagttccaggcctcgatcacaagcataatctgcagatcaccaagctggatctgagctactccgaaaccttcaatcagacgcacttagcggatgcctatgaacgcctgctgctggaaaccatgcgcggtattcaggcgctgttcgtgcgtcgcgatgaagtggaagaagcgtggaagtgggttgactccattaccggcgcatgggcggccgacggcgatgcgccgaagccttaccaggcaggtacctggggaccggtggcgtcggtggcgatgatcactcgcgatggccgttcctggaacgaatttgagtaagactagcgttaatccgggagagttattttaccggtaacatgatctggcgcagtctggcgcataatttttaatcttttaagccccgggaggattcacccccggggctttttttattacactgcctgtagacattttgcccctgagccccagtggtggtgccatttacaccattattcgtcgtcatcgcgcggtggccggacagataaattttgaggagcctctatgaattcgacaatgttacgggtaacaaatcgcattatcgaacggtcacgcgaaacccgctcagcctacctcgcacgaattaatcaagccaaaagcgataccgtccatcgttcgcagttggcctgcggtaacctggcgcacggttttgccgcctgtcaggcagatgataaagcgtcgctgaagagcatgttgcgcaacaacatcgctattatcacctcctataacgatatgttgtccgcccaccagccttatgaacattatccggatatcattcgtaaagccttgcactccgccaatgcggtagggcaagtggccggtggcgtgccggcaatgtgtgacggcgtgacgcagggccaggatggtatggagctgtcgctgctgagccgcgaagtgattgccatgtctgccgccatcggcctgtcgcacaatatgttcgacggcgcgttgtatcttggcgtatgcgataaaattgttcccggtctgaccatggcggcgctctccttcggccatctgccgtcggtgtttattccgtctggcccgatggccagcggcctgccgaacaaagaaaaagtgcgcattcgtcagctgtacgccgaaggtaaagttgaccgtatggcgctgcttgaatccgaagccgcctcttatcatgccccgggcacctgtaccttctacggtaccgccaacaccaaccagatggtggttgagtttatgggcatgcagctgccaggttcctcgtttgttcatccggacgccccgttgcgcgaagcgctgaccagcgccgcagctcgtcaggtgacgcgcatgaccggcaacggcaatgagtggatgccgctgggtaaaatgattgacgaaaaagtggtggtcaacggtatcgttgcgctgctggcgaccggcggctccaccaaccatacgatgcacctggtggcgatggcgcgcgcggcgggcattatcattaactgggatgatttctccgatctttccgatgtggtgccgctgctggcgcgtctgtatccaaacggtccggcggacattaaccacttccaagcggcaggcggcgtgccggtactggtgcgcgagctgctgaaaggcggattgctgcatgaagatgtcaataccgtcgccggcttcggcttgtcgcgttacaccatggaaccctggctgaataacggtgagctggactggcgtgaaggggcgaccgcgccgcttgacgatcaggtcatcgctaccttcgagaaaccattctcccgccatggcggtaccaaagtgctgagcggtaacctcggtcgtgcggtcatgaagacctccgcggtgccggttgagaaccagattatcgaagcgccagcggtcgtctttgagagccagcacgacgtactgccggcgtttgaagcgggactgctggataaagattgcgtagtcgttgtacgccatcaggggccgaaagcgaacggcatgccagaattacataaacttatgccgccacttggtgtattattggaccgccgtttcaaaattgcgctggtcaccgatggccgactttccggcgcatcaggcaaggtaccgtcagccatccatgttactcctgaagcctacgatggcgggctgctggcgaaagtgcgcgatggcgacatgattcgcgttaacgggcagaccggcgagttgaccctgctggtagatgaagctgaactggccgcacgccagccgcatattcctgacctgagcagctcgcgggtcggaaccggccgcgagatgttcggcgcgctgcgtgagaagctctccggagccgagcagggcgcaacctgcattactttttaagacgattcgatttgtagatctggcgagagaaaactctgatgaaaaactggaaaacaactgcagaagcaatcctcactaacggcccggtcgtaccggttatcgtggtgaaaaagctggaacacgcggtgccaatggcgaaagcgctggttgccggtggtgtacgcgttctggaagttacgctgcgcaccgaatgcgcgctggaagctatccgcgctatcgccaaagaagtgccggaggcgattgtcggcgccgggaccgtgaccaacgttgagcagctgaaagccgttactgaagcaggcgcgcagttcgctatcagcccgggcctgaccgaatccctgctgaaagcggcgaccggcgaaggcaccatcccgctgatcccgggtattagcaccgtatccgagctgatgctgggcatgcagtatggcctgaaagagttcaaattcttcccggcggaagcgaacggcggcgtgaaagcgttgcaggcgattgccggtccattcggccacattcgtttttgcccgaccggcggcatctctccggcgaattaccgcgactatctggcgctgaacagcgtgctgtgcatcggcggctcctggctggttccggccgacgcgctggaaaacggcgactacgatcgcatcaccaaactggcccgcgaagcggtagaaggcgcgaaataatttctgcgcctgtaatgacagaagcccggtccgcgtgagcgaccgggcttttttttatcccttcacgacgaccgcggcggcagcggttttggcgcggctgatggcttcatcgacgttgtcagcaaccgccagggtaacccccaggcgacgcgcgccggcgatctccggtttaccgaacagacgcaactgcagactcgcgccgacggcggcctgtagattgctaaaggtcacgttctcactggttagctgcggtaaaatcaccgccgatgccgccggtccatactggcggatggcgccgatcggcaggccgaggaaggcgcgaacgtgcagggcgaattccgaaagatcctgcgagatcagagtgaccataccggtatcgtgcgggcgaggggagacttcgctgaagatcacttcatcgccgcaaacgaacaattcaacgccgaacagtccatatccccccagcgccagcaccactttgcgggcgatctcctgcgcgcgttgcagcgcgagatcgctcatctgctgcggctgccaggattcacggtagtcgccatcttcctgacgatggcctaccggggcgcaaaagtggacgccgtcgacggcgctgacggtgagcagcgtaatttcaaaatcaaaatttaccaccccttcgacgatgacgcgtccggcgcctgctcgcccgccttgttgggcgtattgccaggcggcgctgagctggtcagccgagcggataaagctctggcctttaccggaggagctcatcaccggcttaatgatacaaggcaaaccaatttcgtcgacggcagcgcggaacccctcttcactgtcggcaaaacgataggcagaggtgggaatttgcagctcttcggccgcgaggcggcgaatgccttcgcgattcatggtgagttttgcggctctcgccgtcggcactactttttgcccggccagctccagctcaacaagcgtgtcggtagcaatggcttcgatctccggcacgatataatccggcttttctaaggcgatcagttcacgcagcgcgtcgccgtgcagcatattgatgacgtgcgaacgatgggccacctgcatcgccggcgcatcgggatagcggtcgacggcgatggtttcaatacccaaccgctggcactcaatggcgacttcttttccgagctcgccggaacctaacaacattaccttcgtggccgcggggcgcagcgcggtgcctaataaagtcataacctactctcagcgtaaacagaacatggcgcgcattataaacgaaaacgtttgcgtctgtctttacacgcgtaagttgagaacagcggcgaaatttgatatgctgtatataaatacagtataaagaggctgcacaatggcggttgaaatcaaatacgtcgtgatccgtgaaggtgaggaaaaaatgtcttttgccagcaaaaaagaggccgatgcttacgacaaaatgctcgatttggcagaggtgctcaatgactggctggtcacgtgcccgctggaattggatgaagctcagcgtgacaatatgtcgatgtggctggccgagcgcaaagacgccttacaccacattctgaagtcagggaaattgccggaagcagaagagcatgctgaggcggcggcagaaatgccggagtctgcgcctacagaggatgaagctcagcctggtgccgccgaagaaggcgccgcgaaaaagctgcgcaaagcaaaggccgcctgataaccggcgaagcggaaattttcgcatctttagccagtcataacatttcctgacgtctcgtcgtttaggctgatggcattgcatctcgcgctatgaggaatgttatggctaactggcttaatcaactccagtccctgctgggccagcagggcaatcccgtctccgctgaaaaatcttcatccgctaaaaacctgctgcccggcgccttgggcggccttgctggcttgttggtcgccagcaaatcatcgcgtaagctgctggcgaaatatggcaccggcgcgctgctggttggcggtggcgcggtggccggcagcgtgctgtggaataagtatcagcaaaaaatgcgcggccagcaggcagatgtcgcgacacagacatcaacagcgtcaacccaggaaccggttgtgctcgatgcgcgcagcgagcggctgattaccgcgttagtcttcgccgccaaaagcgacggtcatattgacgagcgtgaacgtcagcatatagaagagcagttgcgagcggcgaacatcgacgtgcagggccgggtgttgatcgacagggttttaacccagccgctcgacccgcaacggctggcgcaaagcgtgcgcgatgggcaagaagcgctggaaatttactacctcagctgcgcggtaattgatatcgaccattttatggagcgcagctacctggatgcgctcggtgacgcgcttaaactgcctgaagatgtccgcgaagagatagaacgcgatgttcaggcgcaaaagcaggcgcttgattcttaaaagagagcgttccgcttgcatcgctggccacttttgccacccttatagacacgacatcgttcagggcgcacgatgccctgagtgattttgtgattccataataagacgcagaagaataacgcatgctaccgaaagctaaacggatcccccacgccatgacgttacatggcgacactcgcatcgataattactactggctgcgcgatgacgaacgcgcgcgcccggaagtgctggactatttccatcaggaaaatgactacggtaaaaaggtgatggactcgcaaagcagcctgcaggagcgggtgctgaaggaaatcatcgatcgcattccgcagcgggaggtctccgctccctatagcaaaaatggctaccgctatcgccaggtttatgaaccgggctgtgaatatgcgatctaccaacgtcagtcagtgctcaaagaagagtgggatgaatgggagattttgcttgatgccaaccaacgggcggcgaaaagcgaattttacaccctcggcggattaggcgtcgcgccgaacaaccaactgatggcggtggcggaagattacctttcacgacgtcagtatggcttacgttttaaggatctgagcagcggcgaatggtcggcggagatcctggaaaacgtcacgccaggattcgcctggagcaacgactcgcgcttcttgtggtacgtgcgcaaacacccgacgacgctgctgccgtatcaggtctggcgacatgccgttggtaccaccgcagataacgatgtcctggtctacgaagagaaagacgacacgttttatgtcagcgtgcataagaccacctcccagcagtttgtggtgatttaccttgccagcgccactaccagcgaagtgttattacttaacccggagcttcccgatgcggagccggtgtgttttttgccacgacgcaaggatcatgaatatagcctcgatcattatcagcacgcgttttatctgcgttctaatcgcgagggtaaaaacttcgggctttaccgcaccgtgctccgcgacgaagaccagtggcagacgctgatcccgtcgcgtcctgatgtgatgctcgaaggttttactctattcaccgactggctggtggtcgaggagcgtcagcggggcttgaccagcctgcggcagatcaaccgtaaaacgcgggaagtggttggcattgcctttgacgatcccgcttacgtcacctggcttgcctataatcccgaaccggaaacgtcaaggctgcgctacggttattcatcgatgaccaccccggatacgctatttgagctggatatggataccggcgagcggcgggttatcaagcaacaggaagtgcagggctttgacgccgcctgttatcgcagcgaacacctgtgggtgaaagcgcgtgacggcgtggaggtgccggtatcgctggtctatcaccgcgaacactttcgcaaaggggccaacccgttactggtgtacggctatggctcttacggcgccagcatggacgctgattttagcgccagccgtctgagcctgctggatcgcggctttgtctttgcaatagcccatattcgcggcggcggcgaacttggacagcagtggtatgaagacggcaaattcctcaacaagaagaatacctttaacgattatctggacgtctgcgatgcgctgctggcgcagggatatggcgaccctaaattatgttatggcatgggcggcagcgccggcggcatgttgatgggcgtggcgattaaccaacgaccggatttgttccacggtgtggtggcgcaggtgccgtttgttgacgtactgaccaccatgctcgacgaatctattccgctgacgaccggtgagtttgaggagtgggggaatccgcaggacgaaacctattatcactatatgaagagctatagcccctatgatggcgtctcagcccaggcttatccgcatatgttagtgaccaccgggctgcatgattcgcaggtgcaatattgggagcccgcgaagtgggtggcgaagctacgcgagctgaaaaccgacgacaatctgctgctgttatgtaccgatatggattccggacatggcggtaagtcgggacggtttaaaagctacgagggcgtggcattggagtacgcctttttaatcgccctcgcgcaagggactttgcccggcaaggtggaagtgtagcgttattcgccgagatagtgtttgagggtcagacgcagttccgggctcatccggtccaggttattgaacagccaacgtaaataacctggatcgttttccgccacttccgacaccgctttgccgcgatatttgccgaaggtaaaggtagttagcagcgccgggcggccggttatgtcggccatttcatccggcgaccagccggaaacctgcatgatatccaacagtagggcggcggtgatatagcagtcgtacagcgcgcggtggtgatgcaaacccggcggggtggctacgctcagcttgcgcgacttatacaaccccatattgctgtacttaatccccggccacaggcggcgcgccagcttcatagtacaaatccactcgccgttcatttccggtaatacccggcgatcaaagctggcgttatgggcgacataccatgggctgccctggtagtgcggcacgatttcttcaatccagggcttatcggccaccatctcttcagtgatgcgatggattgccattgcctgcgggctgattgggcggtcagggcgcaccagatgactcatgggattggttatccggccgtcgatgatatcgacggaggcaatttcaacaatgccgccctgcaaaccgcaggtttcggtatcgattacgcgcagcatggcttactcctcgccaaaaaccccagcgtaatagaatgtgcggcggttgccaatggggggatcctcaaggaatgagcaatcatttcgctttcggttcatacggcaggcgggaaagtgacacggatgccagacggtgcgcgatcaatcgttcacgaaaccagtcgcgcaggtgagccggttgctctcgctcgacgagatcggcaacgacgggcatattgtagcgttctttaaaggcgacgccggccgctgcgaggtcaacgttgaccttgtccatttcatcttgcgaaatttttgccagattatttgccatcagtacctccttcattacggcgcaaaagttactaagcgtgacgctgaaaggcaagtcccggatgcttagctcgactctgctattatacagggttattctctgtccaacatacataacaaaaaggaatgatgtttatgcgaaccatcgccggacgcgcgctaagtgccgccgtatttctcagcgctatgttaaccaccgccagcgcttttgctcatgctcatctgcaacaacaaatcccggcggccgattcgacggtctccgtttcgccgcaggcgcttacgttaacgtttagtgaaggcgtcgagctctccttcagcggcgtgaccctcaacggcccgcagaataaacctgtcgctaccggcaaactggcccgcagcgacggtaataaagcgcaattaacgctgccgctgaatgaaccgctggcggcgggcgagtacaccgtagagtggcatgtggtctccgttgacggccataagaccaaagggcaataccacttcagcgtgaagtaatccatgctgtcgggagtgtatatcggcctgcggtttgtccacttcatctcattgatgacggccttcggttgcgcgctgtacggcgcatggtgggcgccagtctcgctgcgtcgcctgttgatgcagcgcttttatccactgctgcgctacctgctaatgattagcgctatttcagctaccttgatgctgatggcgcagggcgggttgatgggcgatggctggaatgatgtctggcaacccacaatctggcgcgctgttatcgggacgcagtttggcggcgtttggctgtggcaggtggtgctggcgtggattgcgctggcggtcgcgtggatcaaaccccgtcgcccggcgcgtctattgttactgctattttgcgcgcagttgttgttgatggctggcgtagggcatgcggcgatgcatgatggttgggttggcgcattacagcgcaccaatcacgcgttacatctgttttgcgtctcggcatgggccggcgggctgttgccatttgtctactgtctgcgactggcgcgcgggcgctggcgtcaggtagcgataaccgccatgatgcgtttttcacactatgggcatctggccgtggctggcgcgattgccagcgtgattggcaatacgctgttgatacagggacaactgattggcgactcaccgtggggaacggtgttgttgttcaaatgtgcgctggtcgccgggatggtagcaattgcgctggtgaacaggtatgttctggtaccgcgaatgtcaggtaacggctcgtgggcggaacgaactattttacgcactacacagctggaaatggcgcttgccgcgctggcgatacttgccgtcagcctgttcgcgacctggcaacctaattgaattaactggctaaatgatgaaaaaaatcgttctgacaatgttattactggcaagctcaggcgccgcgctggcggcgccgcaggtgattaccgtgagccgttttgaagtgggtaaggacaactgggcgttcacccgtgaagaagtcatgttaacatgccgcccgggtaatgcgctgtacgccatcaacccgagcaccctggtgcagtatccgctgaatgatgtcgccgagcaggaagtgaaggccggcaagaccagcgctcagccgatttctgtcatccagaccgacgacccgcagcatccgggacaaaaaatgagcctggcgccatttatcgaacgtgcgcaaaagctctgctgataattacctatatcactttgttttaaagataaaaaaccgccggcgtctggtaagaaaacgcggcggttttttgttggcgcaacggattttgtcagcaatttttcaaccgcttttgtcgcggactggaaaacctgtcacagtcaactattcttataaggcaaggcgacttagcctgcattaatgccaacttttagcgcacggctctctcccaagagccatttccctggaccgaatacaggaatcgtgttcggtctctttttatctattattcagcgagttatacacatccattgttaatgctcatccggctgaacgctgagctttttcccttatatcacaacaaagttattcttaacattccctttacaaaaaaacgtgacaatataatcaatagctcacggtaaccaataccgtatcactgtacaccccagcaggttgattgctctgtgaggcgttcacccgagctttgaagtttgtttgctgtgcgttgccatttcccaccaggctgacatctgctgttggcgtccaggcgctaccgtcggttttataaagctgatattgcaggtaataatttgtcgaattaatcgtttggctcatttgccgccaactgccgttaagggcgttgatgctggaaaggttaatgctgtatgccgcattctgcgtgcagcggatagttaactgcccgctgacctcgctaaaagcggctaccagagccgctgtggagaaggcgacatcgggcgcgtcatcaatatagcaatagttagtcacgttcatagttataagaacttgtgaagttaacgtgccatcgtccggtacgcagatccccagcgcgcctatcaggcaatagtgatatttccattcaatggtcaaggtgtcgttataggttcccgcagggatattacttcctgctattgtctggaaataaagcggaatggttccgtcactggtattaaataagcctaatagatcaatcaacgcgttaatggtccaggggattgcaccatcaatttgatacgacgggttacagccggcatctttacaaactcgataggggatccaggcgttgttagcgctgttataaagtcgagggattttgccacttttatttgccgaatctttgagcgttgcggtaatggtgctggttgaaaaaagcgatagtatgttggtacagctaaagcctgcaccggcgcttaccccttgcggagttgccgccacatcaaacgatctcactgagccaaaattaggcgagctaggcttaatcttgcaatctgcgagtatcaagccgctgtagcctgaaataacgagtaatgaacataaccaaagaatcgctttcaaagtcatctccgttcattcttagccacagcttagtgggccgatacgttgtggcaccggcgtagattccggcagcgtgaataaagcccggcattcgccgttagccgtgtgaataactaattggttttgctggtttagatgggtaaaccacaccagaccgtcataaccgaccacgccagactgctggctggtaagttcctcaacggccgttcccagcggcaaaggatgacccgttttatcaaccaaagttatcgaggccgaacgcacgcgtgtaaccgggaaatcaaccagcgcaccgctggcttcccgcaccgcaatgcgtttctcgacgactttagcctcaacgtcggttggcagcggcagagtgtcgagggtcactttgcccggataccaggcggcggcccacgggatcagcaggtgcccgctatcgtcggtagtgccgacttttcgattttcataattgaccgcgacgtccggatagccgacggtcgagacgacgataaatgaatcgctgattcgtcgcgcgaagaacaggctgctatccatcattaccaccgagcctgctgcttcaaaccagccctgattatcatgctgcgaaccgtaataaccgccgctcaaggttgaaacatcattcacccaggtcagatccgcctggctgtagcgatctccactgatggagtgggctaaattccagccgaaaccgccttccgcaggggcggaacgattgtaggcgacgttttgcccccactcgccggagctggcgcgctggctgcttaactgcagtgaaccgaaactgtcgaagggaatggttatctgcatcatgctggagtaggtgtctgcctgcaaatcgcggttgatgctcaggttaaagctgctgttccgccacaggctgcggctccaggaaaagttcatcagccgggtgcggctgttgtcctgggcctggatatcgaaatatccgaggctaaatgcgccaagcacttttccccatgggctgagacttaatgtcgcctggtctgactgacggctgagggttgtcgttgagcgatagctggagagattggcgaaattctcgctgcgttgaatatgctgatagttaatcccccagatattgccgtagtacgaatagcccgcggaatactggttgccctgcttatcaccctggctcgcactggcagacaggctcaaggtgccaatcgtgccaatagtgatgtcgctgccgataccgccgttggttaatccttgccggtcttcagtatgcgttgacaccgtcagccaattggtcaagccatagcgatagatcgcgctgacggcgccggcaccgtagtcggcgtttttagtgccgtaattattacgcaacgcgccgagggtaaaatcgaaatcgctgagtccctggcgtagcagagtgttggagacataaaaaggcacgctagtggagacctggcggccaagcgcatcggttgtgacgatagtcgcttcgccggcgccgctgatgtagggtacgttggtgagagtataagggccgccgttaatttgcgttgagctggctttgtagccgttgataaagagatcgacactggaggggaccgccgcgctaccggaaagattgagcaaagggtaggtgatcaggtcagggcgtaccgcaaagttacggctgagacgaataccgccaacacgtactgaactactccatgttaaagcattacttaccacatcccccgcctgatagctgagcagactttccgggtcgctatatttccacagcgaatcgtagcgaatatagccttgttggctatcgtcgtgacgagatgaccagttctgtctgatcatcgcattgtttgaaaacaccccggctgggccgaaaaggcgaaattccgtcgaggtgctggtggttcgctcgccgccagaagaagccaggctataggaatcgtagttaaacaacagcccaggggtactgatcgcctgcagatactcctgctcgcgactattaccaatatgttgctccggcagccaattatccggaacggttaatttcagcatttgcccgggctggtcgtaaacgaccttgacctccgctatctctcctacgtcaaccagcgttttgccgtcgggaacagggatccacatctgcttgagtaccgcagcagagatccaataacgatcattaatcactttcaccggcacggtacccacaggcgtgttgccgttgacggaaatgccgagatacagcacgtactcctgctgtgtgcctggcgtggccgcaggtgcgggtaacgaatcataggtagccgcccaggccgttgccgaagcaatagccagcagaccaccggttccgatgagaagcctcatggttaacgcgctgccggaatttccaccgcctgactattatcagtcaatttcgcaaacaggcgcatcccggatgcgttcgccgcgcggcctgatgtcgggaaacagacgcgacgtttagccagcacataccccagtaaaccctgagtttgttcgacctgcggctttcctgctgatgttgaccagtagacattactcaacctggcgtgttgattcccggcattgttaatacacagattctgaccgctaagcgaccagcttagcgcggttcgtattggttcgacgctgctttccagcttcagcggttgcgcgccttgcccgtagataaacaaaggcagtacatagcgcatgcgcatattcaggccggcggaactcttgtcagtctgttttgtcggctgcgccgcgggaatttcatcaatcacgattcgatatgatttttcctggccgctggcgaccggagacacacgcatcaggcgaataagttgacgttgtcctggctgaacattggcgaacggggggctggagaccacatcgttttgatcggcataaagatctttagattctttttgatcccaaccgaaaatgcgtagttgtaaatttaccgccgtcgcgccgcggttttccagccacagttcagagcctttatcgctggcgctgatggtttgaaaaataggccacaccagcaccgagctggcggcccaggcgttaagacttattgatgaacccagcaaaacaacaatacaacgatgaatcatattcaacctgtcttattttaataggtcagcgtgaccgtaacggtatcagtgtatgaaccttgcgccgggaagccattcgtggcaaaaaggcggccataaaccgtataagtttgtgtcgtgttggggaatgaggcgacgctgtaggcttgagcgccagtcccccaaacggtagagcggttagcatcctgaaaaagctggtaagccagcgtactgccggtggcgttggacatatagcgttgagccgcagagccgccgttgacgccatagtcaagcgccagcgagatcgccatccccggcgtacacgcgacaacgatagagcccgcgccagcggagctggcgacatcaacattgctataaagcgatgacatggagccaaaatttaaggtgccaaaatcagcgccaggggtccctgttccgttgccaagcaggcagccggtcgtgatctgcgcggtcactttgaaggttttctgcgcactgtcagcccagacggctgtggtcgaaaaaaagaatatgagtagccaaattgcgcgcaacatgacatccgtttctccacagcgttaccaggttaatgttgcagtgaccacgtcctggtagaaaccctcagcaggggcggttacgccgccttgatctgccggcaacacccgggcataaatcgggatttcctgagcgctacccgtccccgtgataccgataccggcactggtaaattcagcctgacgggtgctatttgagtaaagccggtaggcaatttgatcgccgtcggcgctttgcatttggcgcagtccggttgtccctacatgctgaccgttattcaatgtcagcgttgcgggaaggttattgctacagatgattgagaccgcgctggcgccgccgctgccaatcagattgctatctatggcgttaaccaaatcgctataggtgccgaaatcaatggtaccccagctgtttacgccgcttgcgctggaaccattggtgacggtacatcccgagccgatagtcaactgcaccccgacctgacccgtcaatgtacctgtggttagccctgctgcagcgacccatggcgcctgaacgagaagcgctgttgtgataaagataccaggcaaagtgcgcgaaaaagtgtggacgttcatgatgaacctctggattgaaagccgctaagtaaaaccctgtttttgtgaagatgagattaatcccattaatcaacatataatcgctgtctggaaaaatgcttatttttttatatttgtctgttttattgttattaatggtgttttgagctggtttcttgtttttatatggttttaacttcttgtttatgattgtttttctgtggtttgctctgaattttatgaatagcagaaaggaggacttagtataatttttgcaattgtcgtgttagcgcatatttttggcgaaatgccagggaagaagttagtagggggggagagtaaaaaaacaacagaaagaagacacctgcacgcaaccagacccatagtgcaggtgaaaggtgggtctacatcggaagccgctagtatacatatttgtatgataaataaaataaggcaatgatggaatgctataccattaatgcggtttgcgtgttgagcgatggagttattctggggtgattaacgttggatagagtgaagtttccagatagctgaccaatacccatatctcgtcactgaaaataaaccacagggcactgcctaaaataagcaggataatcagtagcaggaaaatttcagttttactcatggtgtcaatggccaacttaaaccgattatcaacaggccacgatattaaccaaagtatctgcaaatgaaaacgccgttatttaaaacggcgaaattttttcgtaataagagatgaatatttattttacgcgtagcagattagccacctgtacggccatatcatccattaactggaaacggcggcgatattcggcgcgttttttgctggcgatactttccagcgatttcctttccagcttcagcggcaagcgccagcggtaactatcgtcacgcacaccttcaattgattgccagaactcatcgtagctggcatggaagtgccgacctttgctcaaacgatagcgcagagcgcggaatacgtggccattatcgctgacggcgtaaatagcctgaatattgctttggccggccaacagccagatgaattccagcagcagacgtttggggaacaggccgtagcaggtgcgggtcgcgtgtttaattgcgtcatgagagacattgcggcgcggtccctgcagtccgccgatgaccagttgccactctccttgatggtgaatcacactaaacgtagcgctggctaacagttgctgctggctatcgcgaagccaaagagtcgtttcaccttctcgttcggctttgccggctgacgaggcaaagagcgtgaaggccgcatcatctttagcggacagggtcagtaacggtcgttctgacggcgatatcatggccgttgccaatcggttctcgcccagcgagtcgacgtactgatagtggctaatgatagcctgggaacgctgacgggcgttaaggtcgcgcactaaatactggcgatgtactttacctggcagcgtagcctgcgccgccagcagttggcggaaatcaccacgcgcagaaagggtgtccagcatctcgcgggtcggctgatagaacagtgccgtacgcagcaaaaatttaagccgatagttgcgcttttgccagataggcgcgggcgtgatacgccccattaccagatcggcaatcaaatttgagcgttgctgaagtgtgcatgatgaatgcaggctattgtccgtcacgatgtcatacctcgtcattattttatctttattctacggatgtcgcgggacaagcttaatggctcgccagactatatttacgccttgtttaacgttgattgacgtatgaatttacgaccacgccttcagtaatattttgtataattagccgagggggtgaaatatgtatcagcgattggcaggtagcacctggcgtaatatttggctggtgggcgatctacatggttgttttgctttattaatgtctcacctgcgccagctaaaatttgacccctggcaggatcttcttatttctgttggtgatttgattgaccgtgggccgcaaagcgtggaatgcctgggtctgctcggttaccggtggttcagagcggtgcgtggtaaccatgaacagatggcgcttgatgcgcgggcgagcggggagatggcgctgtggacgttgaacggtggcgactggtatcaaacggcctcacaagaacagaaacggttggctgatttgttgtttatccgctgtctggaattgccgctaatcattgaactgcgctgccaggatgataccacccacgtgattgcccatgccgactatccagccagcgtctaccgttggcagttgcccgtggcggagcatcaggtactctggagccgccagcgtttgaccgatcatctggcggggcggcacggtgagatcgccggggccgatcacttttggtttggccatacgccgcttaaacatcgttacgatagcgataaccaacattacattgataccggcgcggtatttggcggcgagttaacgctggtgcaactgcagtcggctgtttaaaagtcgctatattccgtcgctggacgccagaagccgtcgataaaatcttctaccgggaaacagccgccctggcgaattcgctgatcgtccatcgcgacgaggcattgtcgctcgctattgtaaacatcaaccacgatgtcttcgcacccgccgtccagatagcaaatgaataatactaaggcgaacatccagccctcataagcgaataaacataaggtaagtgtaggggaagttagcgcagcgggggagggatataaataacccgtctcaggcgacgggttcatttgagtcaggcaaggcgcatgacccaggcatcggattggcgatcgtaatgtttacggtagagtacagaatgttcgccattgagaatggcgggaacgctggtctcggcatcccaggcgtccagttgcatgcataagtcaggatcggatttacaaggaatgcttaacgttcgctcaccctgtgattcgccgtgcagctcggcgtcgtcgatttcaaacgcgccgattcgtacgttagttttactcatcattcaccccgtttgtctgctgagttgtggtacgaccagttaggccgtcatttttcagcgtagacaacggggagtaaatcgccagtcaaaaagtgcgctttttagcgcgcgatcacgactttccggcgaagagtttgccgtcgcgcaccagttcgcggggataactatttttcagacgtgaccctatgcgtttagcgagccctaatggcattccctggaaagtgacgatgacatcgtcctgctgcggcggcgcttcgggatacacatcgcgtccacggtaccactcctccgcttccgttaaggtgagctcaaaaggagcctctggcgtggccagtgagatcaccgcttcatgttgccagcggtagcctttgttatgtgtttcagcgagacgaatcccaatgcgagaaaaacgaaccctgccgattaacgcttccagttcttgcgggaacagccagatttctttatcgcgttgccataaacgaagatgctctggccattgcaggccaacagcattagcggcggcggcgacagcggcggcttcccggcccttcatcggtgcgaaggggaacttgcctactttatagccaggcgcaggcagcggattgatagaggcggttttacgcaggcgggcaacgaaaaaaccctcacaatcaaaaatctgcgggaatacgtgcaggaaaccttcgtcggtgagcgcttcgcgagcctgcgggaagagtgaatccagcgtcaggacttcaaccgcctgcgggtaggtttgcagcagccagttaaccacttcctcgttttcttcacggttcagcgtacaggtggagtagacgagggtgccgccaggacgcagagcatgaaaggcgctgtcaatgagctcacgttgggtggcggcaatctcctgattactttccggcgaccagtttttcagcgcgtcgggatctttacgcactactccttcgcccgagcagggggcgtcgagcaaaatggcatcaaagcattcgggcagcgcggcgccgaagacgcgcccgtcgaagtgggtgagggcaacgttattaatgccgcagcggctgatattggcgtgcagcactttcacccggctggcagaaaattcgttggccaggatcgctccgtggttgcccatccgggcggctatctgtgtggtcttggaacccggcgcagcggcgacgtccatcactcgctcgggcatttcaccatcggcgaacagcgccgccaccggcaacatcgagctcgcttcctgaatataaaatagtccgctcagatgttcggcggtgctgcccagcggtagcacatcgtcatcatcacgctcgatccagaaaccctcggcacaccacggaatcggcgttaactgccagccataaggggcgaccagttgcagaaaatccgcgaccgttatcttcaacgtattgacgcgaatgctgcggcgcagcggacgctggcaggcggcgataaagtcatcgaaagagagatgcgttggcatagccgcacgcatttgagcgaggaagggttccggaagatagacagcgttttgagccacgagcagcgcaccacaagaaaaaagggtgcgcagtttatcataaacgccccggcgcgggacaccggggcgtttatgaggcattgggaattaattaggcagtgccgttccccaatcgcgccactctttcggctcgctttccagcagcaggaagtgtttgccatcctgcgcttttggcgccagtggcgttcccggcggggtggcaaaggcgataccgccgcggataaactggttaaaggtacccgtcttcaccactccgccaatcaggccgaagtcgaggctatagccggaagccagccagaacaccgagttattgcgcactaagtactggtagcgcttactgatacgcagcttaaccattacgcggtcggacatcgagcccagcgtcagcccggtcacggtacccacttccaggccgcggaacagcaccggcgtaccaatatcaagcgaaccggcttccggcacttcgacgataatactcaggccgtcgatgtagcgcgaatcggtgatggtggtgtcctgaatctcgaagtcgcggcgcggcgaaccacgtccaggttcaacgttgatatatgactggaagatcgtgtccagatgttcaacgccggcggcagagatctgcggcgtaatcaccgagaagcgggtgccggcacgggcaaaggtgccgacatattccggataaagcaccgctttcgcctgaacttcattttttgccgtaatcaactccagcgactggatctggccgatgtcgataccgaggtagcgaatcggcatgcccgccgccattttaccggcatcgaaagcgtgcagcgtgatctggccacccaccgcgcgggcggcggtttcggaggcgtacagaacacgcttattgttcaagcgcgcgttggcgctgctgccgttgaggttatcaaagctgatcgcgcctttcagcgcgcgcgccagcggcgacgcctgcacggttagcccattaccgtcgagttttaccttcgcgccgccttcggcccagaagacgctgttattggtcagcaggtggcgatattccggtttgatatgcagatcgatatcgaaagcattactacgaggtttcaccgagatgatctcaccgacggcgaatttgcgatacaacaccacggagcctgcctgcacatcgggcagcgtttccgcggaaaggctcagcgtggtggtcgggatttcactgaggctattttcctgcgctttttccaggttggcatacagcggatagcgactctgcatttcccctttttcgccggggatgatgcggatcccgccatcgacccattcgctggcgctggcgccaagcacctgcacgccatccagcccaactttcacatcaaggcggctgttgacgacaaatttgctatcgccgcgtaccagattgcgatactccggcgcaatggcgacctggaaagtgacaccctctgcggttagcttgcgttccagtacctggccgactttaacgccgtgcagcatcagcggctggccggcggaaacgccatagctttccggcgccgataaagtaacggtggcgacgttcggctcttccagtagcgctttatcggctggcatcaccataaagtgattgcgcggctcgccgtcaccagggaccagttcaaaagtattgccggtgagcagggcgctaacgcttgggttatccagtgagattttcggcttcttcatttgaatcagcgtcttatcccgaagcagggtgaccacactcgggtcgacggtcatctcaccggtaactttaccgccaggattgagattgagtttggttaactgtcccacttccagcccctggtacatcagcggcgtagaacctgctttcaacccatcgccgtcgggtagctccaacgtcaccagcaccccgcgctggctatgcgccagatcttcgtacagattgtactcgtcgttttgcgccgccgctttggagtcgtcaggcgagtcaaaggcgatggcgccgttaactaacgcggagaggttttccagctggactttagcgccgctcaggctgacgtcggctttaatcccggagacgttccagaaccggctgccttttttcaccaggttagtgaagcgacgttcgattaatacatcaatcgtcactccctgattgttggcgttgagcgtgtagtcatacacccggccaaccgggattttacggaaatagaccagcgatccgctgttcagcgaaccaagatccggcgcctgcagatgaatcatcagttcgccgttgttgatgcggtatttcggttgagtatccagggcgacgaaatgatcttccggttcgcctttgcccggcatcataccgatatagttaccgccgaccagcgcatccagcccggaaacgccggccagagaggcttttggcgtcaccagccagaactgggtatctttgcgcagcgcgtctttcatatcgctcttcacgctggcggaaacttcaatcttgctgaggtccttactcaaagagatatcctgtaccgtaccaacctctaccccttgatagcggataggggtacgtcccggaacaatcccgtttgcggactggaaatcgatggtaatcgtcgttccccgaccttcaaagctggtccagatgagccatccggcaatcatcagcgcgatgaccggcaacagccagaatggcgagatacggcgtttggtttttattttggcttcagtcggcgaagcgggcgtttcctgactcatgagcgtcccaaagtaagcggctgtccagccattcaactgcaaggatagttaaaatcaccgcgccgccgaaatagaccgccgccggccccatggtaaaggccaggagctgatcgcggtttatcaacgacatggttaatgagataacaaacagatccaacatcgaccagcggccgatccaggtaatcagccgcagcagcaggatacgcgtacgtagcccctgttcgcacttgaattgtatgctgaccagcagggtaaataacactataactttggtgaatggtaccaaaatactggcgatgaacactacgccggcgattgcgatgttgctgttggcaagtgaaatgatccccgaaagaatcgtatcttcctggcgcgcgccattgacgtagataatcgaaattggcagcaggttggccggcagcaggaaaaccagcgacgcaatcaaggccgcccaactgcgctgcaggctttgcggccggcgatgatgcagcgaggtatggcaccggcggcagcggccgcgggagtcgcgataaccggtatagtgacagccggtgcaaacctgaagattggtgtcgtagcgcatggccggacgttcgggataaaaacgctcccacaactcctcaacgttcatgtggatgagcgtcaggatgctgagtagggtcagcgcgataaaggcgatcaggccgatgccgggctgcaggaaagcatagtcctggaccttaatggaggcgacgccgataccgaccagataaatgtccagcatcacccactctttcagtttgccaagcatcagcagcaccggacgtaggttcatccccagcacgttgccaagccaaaggtaggcgatggagaccaccagcaggacgggcgcaaccaccgcgcagaagagcaccatcgcggcggtaatgggatcgccctggttggtcatctgccagatcccctgcaggacgttggcgtcaatacgcacgccgagcagatgcaaacgcagtagcggctcgctccaggcgaacggcatcagcaacatcattgtaaatgccatactggcgagccgggaaagggaccaatcgcggccgtcgcgtaccttcgcgttgcaccgtggacaccaggcgcattgatttcgtttcacaaccggtatgcggaacagcatgtcgcactgcgtacagcgctgatagtgcgcatgcggcgttggcgaactgaccgaatgaacggtaatcttcttcgtcggcgtgattgagggtgtttttatcagcatttattacgttcgggaatgaatgtatcccactatattaacccaggaatgaattcatcttgagcccgaaggcatttaatgcttattttagtaggcatctgcagatgagatagtaagacaactaagtgattaaaaaatgaacaaaacagaattctacgcggatctgaaccgcgattttcaggcgcttatggcaggcgaaaccagttttttggcaatgatctcaaataccagcgcgttactgtttgaacgcctggaagaggtcaactgggccggtttttatctcctggaaggcgatacgctggtgctggggccgttccagggtaagctggcctgtgtacgtattccggtcggccgcggcgtgtgcggttccgccgtggcgcagaaccgcgtccagcgcgtggaagatgtccatgcgtttgatggccatatcgcctgtgacgccgccagcaattcggaaatcgtctttccgttgcaggtgaataatcagattatcggcgtactggatatcgatagcacggcgtattcccgcttcaccgcagaagacgaacaggggcttgcagagctggtctcgcgcctcgaaacgctgattgcggcgaccgattatcaaaaaatctttgcccacgtcgcaggataatcaacggataacgtagcatttagcgatgacgtcattataatgacgcctgttcatgcctgcggcttgttggctacgtccgttgtaatcaggaaatttcatggaaaatcaacctaagttgaatagcagtaaagaagtaatcgcgtttctggccgaacgttttcctcagtgtttcagcgctgaaggcgaagcgcgccccctgaaaatcggtatttttcaggatcttgtagagcgagttggcggcgagatgaatctcagcaaaacccaactgcgcgctgccttacgtctttatacttcgagctggcgttatctgtacggcgtgaaagcgggagcgattcgcgtcgatctcgacggcaacccgtgcggtgaactggaagagcaacacgttgctcacgcccgtcagcagctcgaagaagccaaagctcgcgttcaggcgcagcgcgccagccagcaggctaaaaagcgcgaagccgctgccgcggcaggccaacaggaagaaggtgcacgccgcgagcgtaaaccgcgtcctcagccgcaggctcgccgtaaagaaggtagtgaacagcgtaagccgcgtcctgcagctgccaaagcaccgcgtgaagagcaacgtcttaccccggtgtctgacgtctctgtattgagcgtcggtcaggctctgaaggtgaaagcaggcaacaacgcaatggacgccaccgttgtggaaatcaccaaagatggcgttcgtgtacagctgacttctggtatgtcaatgattgtacgcgcagaacacctggtgttctgaaacggaggccgggccaggcatgaacaaactttttaagctcaccgcgcttgcgggcctgctagcaatagcaggccatgccttcgccgtggacgatatcacccgagtcgatcaaattcccgtgctgaaagaagagccgcagcacgcgacggtgagcgagcgcgttacctcgcgctttacccgctcccattatcggcagtttgatctcgacaacgccttttcggcaaagattttcgaccgctatctgaatctgctggattacagccataacgtgctgttggccagcgatgtttctcagtttgcggcgcaaaaaaataaaatcggcgatgaactgcgcagcggcaaactggacgttttctacgacctgtacaacctcgcgcagaagcgtcgctttgagcgttaccagtacgccctgaaggtactggatcgcccgatgaattttaccggcaacgacaacttcaacctcgatcgcagcaaggcgccgtggccgaaggatgaagccgagcttaacgcgttgtgggacgccaaggtgaagttcgatgagctgagcctgaagctggcgggtaaagacgataaagaaattcgtgaaaccctgacccggcgttataagtttgcgattcgtcgcctggcccaaaccaacagcgaagacgtcttctcgctggcgatgaccgctttcgcccgcgaaatcgacccgcataccaactatctctccccgcgtaacaccgaacagttcaatactgaaatgagcctgtctctggaaggtattggcgcggtgctgcagatggacgacgactacacggtgatcaattcactggttgccggcggcccggcggcgaagagcaaagcgattagcgttggcgaccgtatcgtcggcgttggtcagccgggtaagagcatggttgatgttatcggctggcggctggacgatgttgtcgcgctgatcaaagggccgaagggcagtaaagttcgcctggaggttctgccagcgggcaaaggggcgaaaacccgtattgttactctgacccgcgaacgtattcgtcttgaagatcgcgcggttaagatgtcggtcaaaaccgtcggtaaagaaaaagtcggcgtgctggatatcccgggtttctacgttggcctgactgatgatgtcaaagtacaactgcagaagctggaaaaacagaacgtcagcagtatcgtcatcgatttgcgcagtaacggcggtggggcgctgacggaggcggtttcgctttctggtctgtttatcccatccggcccggtagtacaggtgcgtgataacaacggtaaggtccgcgaagatagcgataccgacggtgtggtttactataaaggcccgctggtggtcttagtcgatcgcttcagcgcttccgcatcggaaatttttgctgccgcgatgcaggactatggccgtgcgctgatcgtcggcgagcagaccttcggtaaaggcaccgttcagcagtatcgttcgctgaaccgtatctacgatcagatgctgcgcccggaatggccggcattaggttccgtgcagtacaccatccagaagttctaccgcattaacggcggcagcactcagcgtaaaggggttactccggacatcatgatgccaaccggtaaagaagatcgcgataccggcgagcagtatgaagataacgcgctgccgtgggatagcatcgatccggcgacctacgtgaagtccggcgatatgaaaccgttcgaacctgaactgcttaagcgccatgaagaccgtatcgcaaaagatccggaattccagtacatcatgaaggatattgcgcgctttaacgccatgaaagataagcgcaatatcgtttctctgaactacgcgcagcgtgagaaagagaatgaagaagatgatgcgattcgtctggcgcgggtaaacgatcgccttaagcgcgaaggcaagccgcttctcaaaaagatagacgatctgccgaaggattatcaggagccggatccgtatcttgatgaaaccgtgcatatcgcgattgacctggcgcaacaggaaaaagcgcagcctccggtagaaccaccggttagcaaataactcctcaacgggcacaagtgattgtgcccgtttctttttctgtcctcatccggctgtcgactttattcaacaaaattgtcaacactcgcctggggtgtcagcgatatgctacaaaatgtaaagttgtgtctttctcgtgacttagcggggtctgatcgttgaaaattagcatctgacccatacgatatggggtatcgcatagtgcgttttgttaaatcgaggtaaaaagaatattatgatgcgaatcgcgcttttcctgctgactaacctggcagtcatggtggtgtttggcctggtgcttagcctgacggggatccagtcgagcagcatgaccggcctgctgatcatggcgctgctgtttggttttggcggctcgatcgtttcgctgttgatgtcgaaatggatggcgctgaagtcggttggtggggaagttatcgaacagccgcgtaacgaaactgagcgttggttgatgaacaccgtcgcacagcaggcgcagcaggcaggcatcgccatgccgcaggtggcgatttatcacgcccctgacatcaacgccttcgccaccggcgcgcgccgcgacgcttctctggtcgccgtgagtaccggtctgctgcagaatatgagccgtgacgaagcggaagccgttatcgctcacgaaatcagccatattgctaatggcgacatggtcaccatgacgctgattcagggtgtagtgaacacctttgttatctttatttcccgcgttatcgcgcagattgcggccggtttcctcggcggtaaccgtgaagatgaaggtgaaagcagcaacggtaacccgcttatctactttgcggtcgctaccgtactggaactggtattcggtattctcgccagcatcatcaccatgtggttctcgcgctatcgtgaattccatgccgatgcaggttccgccaaactggtcggtcgtgagaaaatgattgctgcattgcagcgtttgaaaaccagctatgaaccgcaggaagccagcagcatgatggcgttctgtatcaacggtaaagcgaaatcgatgagcgaactgttcatgacccacccgccgttggacaaacgtattgaagcgctgcgtagcggagaatacctgaaataatctgccgtgcagacgctgaaaataaaaatccgcagctttccggctgcggattttttttggccgctcgttatcaggcggcgcgcggttgagttacacgtagaccgctgatggcggcggcaatgaccgccagggaaccggccagcagaagcgcggtgtgggtgccgctattgcctgccaggttaaacagcagggcgaccagcgcggcgccgctactttgccccagtaagcgtgcggtacccagcataccgctggcgccgccgctgcgatggcctggcgcagaggagacaatggtatggttgtttggcgactgaaacagtccgaaacctgcgccgcacaacgccatccgccagataatatcgagatcggaaggtgaagagggtaatagcgcaaggccaaacaggccgcaggccatgatcagcagtcccattgcccccaacagcccggcatgaaccttttcgatcaaataacccgccagaggggccatcaccatggtcgccaacggccacggcgttaacagtaacccggtctctacttcgctgcgtccgataacggtttgcaggaaaaagggcagggaaaccatcgccagcatctgcgcgcaaaaagagcagatcgaggtgcagatagagagcgaaaagattggaatgcgcagtaaatcaaccggcagcagtgggaccggcatgcgcaactgccggcgaacaaagaagaagccgataatcagcatagcaatgacctcggccaataccaggtaaccggattgcccctgggcaaagccgccgagcgccgtgatgagcagcccgaaggtgagggcgttcatcatcgcgctcggcagatcgaaacgggtaatcttgctggcgctgctgttgggcggtaaaaagcgcatggcgaggaagatggaaataatccccagcggtacgttgattaaaaacagccattgccaggaagcaagcgagaggatagcggcggcaatggtaggccccgcggcggaggagacggcaacgacgaaagagttgatgcccattccgcgacctagctgcctcttaggatagataaggcgaatcagcgccgtgttgacgctcatcagcgccgcgccgcccaggccctgggccacacgcgccagcgttaacatctcgagacttcgggagagagcgcaaatcagcgaggtgatggtaaacactaccagaccaattttatagattcgtcgatagccaaccatatcgccaagaaacgagagtggcagcagggcgatgacgatagcgatttgataggcgttgactatccagattgaagatgccggcgaggcattcaggtcggtggcgatagtcggcagggcgacgttggcgatagcgccgtcgaggacggccatcgtcaggcctaatacaatcgtcagaatggcgccgtaacgctgcggaaccggcaggccatccaaaagttttttttccatgtgaagtttaagtcttagaggaaactattttctgattaatgattttagcattgattattcaaccataagtcgcagatttgtaaccaactcgcagaacaacgattgcgacggtcataatgtgaatttataataaaaaacagttctgaattttataaaacagttacgatgaggtgaacaatggcagctgctgatatggataaacagccagattctgtctcttcagtattaaaagtttttggcatcctgcaggctttgggcgaagagcgtgagattggtatcaccgaattgtcacagcgtgtgatgatgtctaaaagcacggtgtatcgttttttacagactatgaagtcactgggctatgtcgcacaggaaggcgagtctgagaaatattctttaacgttgaagttgttcgagcttggcgcgcgggcgttgcagaacgttgacctgatccgcagcgcggatatccagatgcgtgaaatttctcgcctgaccaaagagacgattcacctcggcgcgctggatgaagacagcatcgtttacatccacaaaattgattccatgtacaacctgcggatgtattcgcgtatcggccgacgtaatccgctgtacagcaccgccattggcaaagtgctgctggcgtggcgcgaccgggcggaagtcgagcaaatcatggatggcgtcgagtacaaacgtagcaccgagcgaaccatcactgataccagcgcgctattgaaagtgctggaccaggtgcgcgagcagggctatggcgaagacaatgaggagcaggaagaaggattacgctgtattgcggtgccggtcttcgatcgcttcggcgtggtgattgccggcctgagtatctccttcccgacgctgcgtttctctgaagaacgtttgcacgaatatgtggcgatgttgcacgctgcggcgcgtaagatttccgagcagatgggttataaccgttacccgttctgatagtgaatgatgagctacagcgtaataccttaccctgtagctcctgtcattttaaccttggtcgataaccttcacgcttttgcgcagaatagggcagttggtaataccaataataccgctatcagaatgaacatattgtgcggtggtgataccctgcgctgtcaggtatttgcattgcagtcccagcccgccagcattctgattgctgccaattaacacgccataaccgcttaataatacgccaatccagacaatcgccagtatgacaatagagcgaatgatcaatcgcatttttgcctcgttatttgtatgatcctgccgtgtattctggcacgaacactatttgatacaagtctatgattcctaaacttgcctttcgtattacagttagccgcggtttaagaagatcgtgttatcctggcaacatctgattatggtacggagtgtggagtgaaaaaattacgctgggttttgctgatcgttgtcatagcgggttgtttgctgctgtggactcagatgcttaacgtaatgtgcgatcaggatgtgcaatttttcagcggtatttgcgctattaacaagttcatcccctggtaagacatttttgtgccgacggattttcttctgccgcgcgggtggtagaatgaacgccttctctttgaggtggtgaaatgagtgagttactgaatcctgggattgtaagtctggcgtctctggcgctttccgttgtactgctgttggtggggctgctgttatggttctttgtgaatcgcgccagttcacgtagcaatgagcaaatcgaactgctgcagtcgctgctggatcaacaaaagcggcaaaatgcgctgctgcgccgtctctgtgaagccaatgcgccgcacaaagaagaggttgctgaaccttcagcggatgagaaggagaaaaacgacgacgatttcattcgtctcgttgccgaacgttaagtttgaagaacaggtgtgcacatcgcgtgcgcgcctgtgagtgctacaaaattttgctataacttattcttatgtaattccccatttcgcggccggtcgttaccgtttaatgaattaaacatccacgctctatttcacatattgaataatcttttgagctaatcaaaaaaagtaataacgaaacgtttctattgcctgacggcaatactttgtcattaatatttcattattaagggctattttagcggatatttgggctgtaacgagttaggggtttaattaacactactacgcggcgagtgaaggcgatttcctcttgttctttaaagttatttgcgcatcattatgcacatgatgccgcaacgccccctcaaatatggcagttcgtatacgtacgtacctggacgaacagaagttgttgagctatggtaaaaaagttgcatttatcaggcatacgttattgtgtgtttggtaacgatgcaaagataagccaggcgcggcaaagacgcataaatgtgcaggcgatcaaatgatttcctgataatttgtgcgaacgatcgtgacacgtttaaaaatggcttgccattatttacgttgtgtgtgataacacgtttcgggttaaacgaggtacagttctgtttatgtgtggcattttcagtaaagaagtcctgagtaaacacgttgtcgttgaataccgcttctctgccgaaccttatattagtgcctcatgcagttatgtgtcagttttatctatgtaagcacctgcgggtgaagaaaacagtttaaggaattttgcaaatggcaaagattaaaggtcaagttaagtggttcaacgagtctaaaggttttggcttcattactccggctgatggcagcaaagacgtgttcgtacacttctctgcaatccagggtaacggcttcaaaactctggctgaaggccagaacgttgagttcgaaattcaggacggccagaaaggtccggctgcagttaacgtaactgctatctgattcaagaccactcatcttgtaagaaagcctcgcaaccgcggggctttttagcatctgttgcaaagtatttccaatatttcccctccgacgcgctttgttgcaaaacatcacccttattagcactgtttagcagtctgttttgccaattttctgttaaatcaggtggttgcaaaaaaatgctggagctacggtgcaaaagaataaaagtaagtccgccacaaattttctccctatccgttttgggttgctgtgtgtggcgattttgggatgtcttggatttctgctggcgagggtaggttggctgcaaatcgtctctccggataatctggttaaacaagaggatatgcgttcgctgcgcgaagaacccatcgacgtgatgcgcggaaccattagcgatcgtgaaggacgcccgctggcggtgagcgtgccggtaagcgctatctggatagatccgcagaccatgctggaaaagggcggcgtcggctatggtccgcgctggcaggcaatggcggaagcgttgcatattgatcttattgacctctctcatcgggtgcagtcacatccgcatgcccgattcctctatctcgcgcgtcaggttaatccggaacaggcggagtggatcgataaattacacctgccgggcgtttatctgcgcgatgaatcacgccgcttctatcccgccgggcacgtcgcggcgaacctgctgggctttaccaacgtggataatcaggggatcgagggggttgaaaaaagctttaacaaacagctcatgggaaccccggggcgtcggctggtgcgtaaggaccgccatggccacgtgatcgagaatattaccgagcaggccgctgtgccggcgcataacctgcagctcagtattgacgagcgcctgcagacggtgacggaagatgcgttggataatgccgtacggtggaataaggcggaatccggcgcggcggtattaatcaagattgataccggcgaaatcctgtcgatggccagctacccggacttcaaccctaataaccgcgacagcgcccagctcgatgattttcgaaatcgcgctatcagcgatacctttgagccgggttcaacggtcaaaccgctggtgattatgaccgcgctgcagcaggggattgtgcagccggatagcgtggttgatacccatccctttacccttgatggtcatcgcattcgcgatgtgggttattatcctgagttgacgctcaccggtattttgcaaaaatcgagcgataccggggtttcgcacctctcactggcaatgccggtgcaacacttgatcgacacttataaggcctttggctttggcgacccgaccgggcttggcttgaccggcgaaagctccgggttaatgccgcatcgccgttattggggtgagctggatcgcgccaccttcgcctttggctatggactgatggtaaccccgctgcagctggcgcatgtctatgcgacgatcggcggctacggcattgaacgcccactgtcgataacccgtatcgatccgccggttatcggtacgcgagttatgccacaggagatcgtgcatgaagtggaacatatgatggagagcgtggcgctgccgggtgggggtgggacgaaagcggcggtacgcgattatcgtatcgcggtgaaaaccggcacggcgaagaaaattggccccgacgggaaatacatcgataaatacgtcgcctacaccgccggcgtggcgccggccagtcagccgaagtttgcgctggtggtggtgataaacgaccccagcaacggtaaatactacggtggggcggtatccgcgccggtgttcagccagatcatgggcgatgtgttacgtctggaaaacgtgatgccagacggtatgccgcaaggctctgagaatcttatcgtcatgcataagcgcgaggattcggttcccgcgctgtaacagtggtctgcgagggcgaatagcgctacactttcgccctttcagcgccaccggagttatcatgtcttatacctgtccactatgccacgcgccgcttagccgcagcgaaaatagctatatttgcccgcagcggcaccagttcgatctggcaaaggaagggtatgtcaatttactgccggtgcagttcaaacgttcgcgcgacccgggcgatagcgctgagatgatgcaggcgcgccgcgccttcctcgatggcggatattatcagccgttgcgtgaggcgatttgcagctatctgcgggctttcgcgccgggcgagttgctggatattggctgcggagagggatactacacgcatgctttcgccgccattgccgcacgcagtttcggcctcgatgtctcaaaatcggcgatccgcgccgccgctaaacgttacccgcaggtcgaattctgcgttgcttccagccaacggttgccttttgccgatcggtctctggatgcggtggtgcgtatttatgcgccctgtaacgcggacgaattagcgcgtgtagtgaaaggcggcggttgggtgattaccgctacgccggggccgcgccatttgatggagctgaaagggctgatctacgatgaagttcgtttgcatgaactgaaccgggaagcgatgccgggctttacgctgcgtcatgagcagcagttagcctatccgatgcagttgaccggcacgcaggcggaagcgttactgcagatgacgccgtttgcctggcgagcgaaaccggaggtacgagaattactgcgccagcaggagacctttggctgccagaccgatttcatgattcactgctggcagcgcgaggcgtaagggctacggcgcgaaatgaccccacagaatctgcgcgccgataccgattagcacgataccgccgagaatttcggcccgtttgccgagcagcgggccgataaagcggccaaccataattcccagcgttgacatggtaaaggtggcgcagccgatagccagcgcggtggcgataatattgacctgcaggaaagcaagccccacgccaacggccatcgcgtcaagactggtagcgaatgcggtagtcaccagcaaccagaagccgtggcgacgcggtgcttcacattcatcatcatcaccgccgcgaaaaccttcaatcaccatacgcccgccgagaaacaccagcagcacgaaagcgatccagtggttccattccagtacaaactggctggccaacatgcccagcccccagccgaccagcggcgtcagggtttcgatcgcgccgaatataagaccggtgcgcagcgcttcagaaaatttaggtttatgcagggtggcgcctttaccgatagaagcggcaaacgcgtccatcgacataccaaaggcaagaaggatagtggcagaaatattcatgagcgtgtcctgaccggggaatatccatatgacacatcgctgcccccagtaaacatacgcggagcctgagcataacgtacagcagtgatgtatctatggtctcgcctgattgaacgaccgctcaacccgtacgtgccacgttttgcaacgagtatgttgacacgtacattttccacctgcggaaaatcggctactccccaacgacgggcgcaaccttaacatattttgagaaggtaaaacaatcacagaaaataatattagctacaataaatgataacgattttcatttaaaaaataaagtgaaggattggttaaataatataacgaggtgaggcgggtaaatatagccatggctatatattcccacagtaatgactggcggaaatatagcgcaggctatatctgtaacttattgactggtaacgagtagtttgtatattttttccagatcgtcgatatttcgtacgcgaataagcaggcgccgctgctctaattgcatcaccagtacgccatcttcagacaaattcatcgctttaatccgcggatattcaatccacacgttggcaaagaaaaaaccgctctttttgaacagaattcgcggcgtacggatccagaacagatataaccccattaatgccagcgcagataataaccaggtggtgattatttcgccgtggctggcaatattgttgtaaatgagaatcgccgtcaggccgacgaaaatcatcccgtcgacgcgtccacgacgcagcagggggattgacagcagggtggggccattgcggcgtggcatgatgaattggtcgtagatagcgaaagccaccagggcgacgataaacagaatgagcaccagctccgtgattgccattgatcctccagccagcgtggacctgcatacaggtacacgttttaacgctaaaaaaaagccggggacaaagctgtccccggcctacaacgtgatgattattgacccagcaggccgaccgcgtagccggcgataccgatgacgaagaagccaacgatgatccacagcgggttgactttcttacgcagcagccacatacaggcgaaggtcagcagcagcggcaccagtcccggcatcagctggtcaaggatggtctgcacggtggtcacgcgagtctggccatcctgaccggtgatcgtggaaaccaccagcgggatattaacgtgcgtccatttgttaaccagggcccccatgacaaacaggccgaggattgacgccccctcggtcagtttctgcaggaagccgccgcccatatccttaacgatgtccacgcctttacgatagccgtatgctacgccgtagtagcgggtcagcagacgcacggcattgaacaggatgaagaacagtagcggaccaagcaggctaccgctcatcgcgataccggcgccgagcgcggcgaataccggacgcacggtaccccagaagatcgggtcgccgacgcctgccagcggccccatcaaaccgactttgataccgttgattgcgccatcgtcgatttccgcgccgttagcacgctgctcttccatcgccagcgttacgccgagtaccggcgccgcgacgtacggatgggtgttgaagaactcaaggtgacgcttaatagcctgcttacgcgcatcgttgttctccgggtacaggcgacggattgccggaaccatagagaagcagaagcccagcgcctgcatacgttcgaagttccatgaaccctggaacaggttagaacgaatgaacacgccacgaatatcactctgagtgagttttttctcggtggtatttttagtcatatcaaccatttcgctcacctgttagtccagttcgttatcgagatcgttgttaccagccgcctgagccggggcacccgctacgcggttatatttcgggctcagctgaatgtagagaatggccataacggcaccaatcacacccagggcaaccaggttgaaattggtgaaggccgcggtgacgaaaccgagatagaagaacggcatcagatagcccgcgcgcatcatgttgatgaccatcgcgtaaccgacgacgacgatcatgccgcccgcgatattcagaccgccagtcacgacttccggaatggcattcagcagaccctgaacttcgctggtaccgacagagatggctacgataaccgccgggatggcgatacgcattgcctgcaggaacagcgaggaaacgtgcagccaggagatggccgtcaggttaccgttttcagcggctttatccgccgcgtgctggaaggcaacggtgatggtacgaacgataatggtcagaacctggcctgccgccgccagcgggatagccagagcgataccggcgccaatgctttggtgaccggcgataaccagtacggtagaaataatggatgccagcgcggcatcaggcgcaactgccgcaccgatgttcatccagcccagagcgatcatttccagcgtaccgccgatgatgataccggttttcatgtcaccgagaacggcgccaattaacgtacaggcgaccagaggacggtggaactgaaattcatcaagtaccgactccatacccgcaatacacgcgacgatgaacaccagcacaatctgaagaagggtaatctccattgtacttctcctgttgattaagtcttaaagtgaaggttggctcgcgagcgccgggttaattacccaccttggcgatcaaatccatcattttcagtttctggtcggtggaaactttacgcgcttccagttcaataccgcgggcattcaacttcttgaatgcttcgatatctgtcgcatcgaccgaaatcgcgttattgacctgcgttttaccctggcggaaagccataccgccgatgttgacgctggtaattttcacgccgccttcaacaatacgttcaacgtctgttgggttagtgaacagcagcatgacgcgctcgccggcgtatttcgggttgttatagacgcgaatcatcttcgcgacatcaacaacgtgagcggtcacgcccggaggagccacctgggtcagcagcgtcttgcgcaccgtgtcggcggcaacttcatcgctgaccacgataatgcgggtgacgttggtctctttggtccagcgggtcgcaacctggccgtggataagacggtcatcgatacgcgccaggccaatcaccatgtaatcatttggacccatcggtttagcgggcgttgccgctttcggcgcggcagcctgaaccggcgccgctttttcaaccggtttggctttcagcgctttcacgccttcgctaccggtttccaccgccagcgccaccagctcatcaaacgacggatcgtcatcgcgggccatgaaggtttcaaccagcatcgggacgttgacgccagcgatcacttcatagttttctttatcaacaacaatgcggcttgccgcgttaaatggactaccgccccacgtatcaacgaggaacagcacgccttttgtggtatccagttttgccagctgtgcattgtacttttcgatcagcgtttcggcattttcgccaggaacgaaatcgatccagccaacgttttcctgctcgcccaacagcatttctgcggttttcagcagttgttctgcagcccaaccatgtgtgcctattacaatagcaatcgtcacttgctacctccgttattatggtgaatgcatcatctggtctgatacatcctgaatcactcttgtggaaaaatcgattcagtaagggtgtaagatctaaattaattactaccgggaattattttagatagtgaaaaaataattaatgtgatggagctccgtaaattacgcttcaataatcaataatttcgcagcgcaaaaaatagccttagctattgcaaagacaggtaaatttttgccaattctgcgctatattttgctatgtttatcttccgtttaattactcaggagtatagggcatagcccgccgtatggaccgtcatcgacgtcttttcaccctcaggcactcgtctgccgcctcaaccacacacgcttttttaccagcaaccattgtttcgccggtgcatgacatcgcgatgactaccgctgtcgttaacgggagccgctcatggaattcttaatggatcccaccatctgggctggcctgctgacgctggtagtcctcgaaattgtcctgggtatcgataacctggtctttatcgccatccttgccgataaactgccgccaaaacagcgtgataaggcacgtatcatcggcctgtcgctggcgctgattatgcgcctgggactgctctcggttatctcgtggatggtcacgttgaccaagcctttgataagcataggcgatttttcgttctccgggcgcgatctgatcatgctggtcggcggtatcttcctgctattcaaggcgacgacagagcttcatgaacgactggaaaaccgccagcatgatgccggtcacggcaaaggctatgccagcttctgggtcgtcgtgctacaaattgtggtgctggatgccgtcttctcgcttgatgcggtgattaccgccgtcggcatggtaaaccatttaccggtgatgatggctgcggtcgttattgcgatgatcctgatgctgctggcctcgaagccgttaacccgcttcgtgaaccaacatccgacggttgtcgtgctgtgtctgagcttcctgctgatgatcggtctgagtctggtggcagaaggctttggcttccatattccgaagggttacctgtacgcggcgattggcttctcgattaccattgaattctttaaccaggtggcgcggcgtaactttatccgccaccagtcgacgttgccgctgcgcgcgcgtaccgctgatgcgattctgcgcttgatgggcggtcgcaaacaggcgaccgtggcgcacgatagcgatagcccggcggcagtgccggtgccggaaggggcgtttgctgaagaagaacgctatatgattaacggcgtgctgaccctggcgcagcgctcattgcgcagtatcatgactccgcgaggcgaaattagctgggtggatgctgagcagagcgaagacgaaattcgtcgccagctgctttcttccccgcacagcatgttcccggtttgccgcggcgaacttgatgaaatcattggtattgtacgcgccaaagagatgctggtggcgctggaagcgggcgagaacgttgccgcgatggcatccgcttccccggcgattgtggtgccggaaacgctggatccgatcaatctgctgggtgtgctgcgccgggcgcgcggcagttttgtcatcgtcaccaacgaatttggcgtggtgcagggtctggtgacgccgctggacgtcctggaagccatcgctggtgagttcccggacgccgacgaaacgccggaaattgtgctggatggcgaaggttggctaatcaaaggttcaaccgaccttcatgcgctgcagcaggcgctggggctggacgacctggtcaacgaagacgatgatatcgcgaccgttgccgggctggttatctccgcgaacggtcatatcccgcggataggcgatgttgtcgaactgccgccgctgcagttcaccatcgttgaagccaatgattatcgcgtcgatctggtacgggtcattaaaaccgtccacgataacgacgaagaagagtaatgccgaacccgccgggctaaacttgcccggcgggttgttttttacccccagtcgccgccagacggtgcttctcttccgccagccagcgcggaaaatcctccaccggcaacgggcgggcataataatatccctgtagtaaatccacgccgtggctacgcatgtaaatcttctgttcctgagtttcgacgccttcggcaatggtgacgattttgagccggtgcgccagggcgataatcatatcggtcaccgtcgcgttgaccccatcaatgccaatagcaccggtataagatttatcaattttcagtacatccgggcgaagtttttccagccaggatagcgaactattaccggtgccaaagtcatcaatggccagctggacgcctttaaaatgcaggtgctccgccatgtgatgatcgccttcacgcagaacatcgcgttcggtcagctcgaccaccagctgctgtaccggattagcgctgaaccaataggtgtgcagatcgcgcagcagctcgccgttgctgaaatgacgcgccgccacgttaataccaatatgaaaattggcatcctgcgggaaataatgcagccggcgggcggtttcagcgatgacgtagcgggtcagggggactatcaggttgtagccttcagcaatcgggataaaaacatccggcgagatatttccgcggcgcggattgttccagcgcagcaaaatttccacgccacaacactcctgagtacgtaaatcctgcagcggctggcaccatacctcgaactcgtgggcggcgatacccagggttatttcgcgcgagaaagtcattcgtcctgcggtcgtcaaccaggcgataccggtcatcaacaggctgaacatcagcgccagcggtaattcggcgggcagctcttctaaggctaccgcggaggctcccgggccgctgatgttgatggtaaagggaaactggctggaactttgccggtaaattatcggcagacccggcaaccgatcgcttgcaacaacgccaacatcgctgagaaaactcttgttgcctaccgtgaggctgatgtcgcttatcaacgatgatttttcttttagaatcaattcgccaagcagctcaatattgataattaacaacgcgccgtcggcaccgcttacggaggagggataccactgaatcagtaccggtgtgcctttgagcagcgagttatcggttgaaaaggccaacagcgggttgactgccggcaacgttggctgcagttgatgaatggctacatggcgcgggccaaaaatgctggagcagtaggccatcccggattgaacaaggatgattgagcgtacggtctgcagtgtggccgcggttttacgcagctcaagatgcacatcctgacagggtttgcccaccatactcagcagggtagcgtgttttgccgccagcggctgcaggatattgtccatcgcgatcaccatattgcgggtcaccgtctggatgcgctgttgattttggctacgctgtgaaataaatcggattgtcagggtgacggcaagtgtcagaaatgcaacggccaggcacaccagaatgcgcttgcggcggtatgtcgaaatgaccttctgtgcattttgcatgcgaggcgccctgtcggctaaatagaggaataagagtaacagccggcttaaagcaagtgtagtgggtaagataagttggtgggaaaaaagaaaaatgcgcccggaaagggcgcatttcacagacgtgttttagtcacactggactttgatcgccaggccgccgcgagaggtttcgcgatatttggcgttcatgtctttacccgtttcgtacatggtctcgataactttatcgagagagacgcgcggttcgctggtgcggcgcatcgccatacgcgcggcgttaatcgccttcacggaggcgatagcgtttcgctcgatgcacggcacctgaacctggccggcgaccgggtcgcaggtcaggccgaggttatgttccatgccgatttccgccgccacgcaaacctgctccgggctggcgccaagcagttcagccaggcccgccgccgccattgaacaggcgacgccgacttcgccctgacagccgacttccgcgccggaaatggacgcgttcatcttgtacagcgcgccaatcgcgccggacgccataaagtagcgaatatagatatccgggctgacggactcgataaagtgatcgtagtaggcgagcactgccggaacgataccacaggcgccgttggtcggcgcggtaacaacgcggccgcctgcggcgttctcttcgttgaccgccagcgcgaacatgttcacccagtcgacaacattcatcgggtcgttagacagcttatcgctggcgaccagcagacgacgcagcgccgaagcgcgacgcggcacgcgcagcggccccggcagcacaccttcggtgttcatgccgcgatcgatacaggcgcgcatggtttgccagacgttttcaaaataggcctcgatctcttgcttgctgtgcagcgccagttcgttttgcatcaccatgccggagagcgacagaccggtttctttgcagtagcccagcatttcctgtgccgatttaaacggatacggaacctgcagttcgctcgcgtcttctttgccgaaatgctcttcgtcgacgataaaaccgccgccgattgaatagtaagtcttgctgtagatttctttctcgccggcccacgcatggatagtcatgccgttttcgtgcagcggcaggttgtcgctacgaaaacgcatgccgtcatccgccgggaagtcgacttcgtgttgcccgtttgccagcagcagacggccgcgggtttctacgtcgcggataaatgccgggatcgcgtcaatatcgaccgtcgcaggcagattgcccgccagtcccatgataatggcgatgtccgtgtggtggcctttgccggttaatgaaagcgacccatagacgtcaacggcgacgcgcgtcacttcattaagcaatcccttttcgaccaggtcatcgacgaactgtttaccggccttcatcggccctacagtatgggaagatgagggaccaatccccaccttgaacatgtcgaatatactaatcacgataacactcctgacagggttaccgcggttgcggtaacgatgtaataactgcgcatagtgtaagagggaaccgggttgtcagcttaactattcacatgaattaaactaatggataaccttggttttactaatagtgagagcggcttctcattacttattatagctaagggcgagtgccgatttgcagcgccagctcgcgaataatgccggcggtcattccccagacaaaataatgttggtaccacgatagccagacgcgatgtgaattaccgcgccgatggatgtccagcgggtggtaacgacccaggcgcaacgcctcttccagcggcatttcaaacaccgcagacacctcgtcctgactggcatgatagtgcaggtccggggggattatgccaacaaccggcgtcacctgaaagccggtgacgctgtcgacaggcggcagcacgccgatcacttcaacggcttccggcgggatcgccacttcttcctgcgcctcgcgcagcgcggtggcaatcaatgtagcgtcggtgttatctactgcgccgccggggaaggcgacctggcccgcgtgcttgcgcagcagcggcgaacgctgggtcagcaacagtcccggctgcggccgacggacaatcggcaccagtaccgccgcctggcgctggtttagcgactgcggcgagggctgcgggcgcagcagttgaaaacgggatagaaagtcgtccagatcgagggcgttagccgccatgttctagctctccagttgatgcaggatacggttaactttatcaaaagtttcctgatattccgcggcttcttcgctgtccgccacgataccgccgcccgctgagcagtacagttggccctgccaggcggtgatcgtacgaatagtaatgctggtatccatattgccgcacaggctgagataaccaatgctgccgcaccatgcgttgcgtcgctgcggttccagttcatcgataatctccatggcgcgaactttcggcgctccggtaatggagccgccagggaaggccgcgcgcagcagatcgctggcatcaagcgtagcaggcaatcgtgcggtgatggtgctcaccaggtgatgcaccgccgggaacggttcgaccacaaacagttccggtacgcgaacgctgcccggcacggcgacgcggccgatatcattgcgcatcagatcgacaatcattaaattttcggcgcggtctttcggcgagtgggcaagcgttgccgcctggcgtgcgtcttcctgcggggaatcgagtcgcggcagcgtgcctttaatggggcgcgtctggatgtcaccctgatgcagttgaataaaacgctccggagacaggcttaaaatcgccccttccggcaggcgaataaaggcgctgaacggcgcgcggttggcggcattaagcttacgaaatgcctgccattcatcgccgcggtagcgggcctgaaaacgctgcgccaggttgacctgataacagtcgccgctgcgcaggtacgcctgtacctggcggaatttttcgccgtactgctggcggctcatattcgactgccagcaggaggtcagggagaaaggttcagccggctggcatgtttgcgattccagccactgcaggcgccgttgcggatcgtcatagctcagcaacgacacctgctggcgttgatgatcgacgatcagcgcccagtcataaatgcctaccgccatctccggcagggcaatatcagcctgcgcttgcgtcggaagacgttcaaagcggcggccaagatcgtagccgaatagccccagcgcgccgccgagaaacggcaggttatcatcggcctgcggcgttaactgacagcgaaccaactgctgttgcagcagctgcagcggatcgtcctgcgagacaaatttgccttcaccgtcgttgacccaggtttgctcgccgcgggtaaccaacgtcgcgcgcgggtcggcgacgataatatcgaaacggctatacggatggtcggcgaagccggagtgcagcagcatcgcccacggcgtggcgcttaacggcgcgaaatagcgttcggcggcatccgggcgccagggcagggtgataatagcgggggacaacattaacctcgatcctaatgtgccgcccactggcgaaatggcggacggcgtgaaataattacgccccacaatgtagcaggagtgagtgatgtttgcaggtttaccttcgctgagccatgagcaacagcaaaaagcggtcgaacgtattcaggaattgatggcgcagggaatgagcagcggccaggcaatcgccctggtggccgatgaactgcgcgccacgcacaccggcgaccggatcgtagcgcgcttcgaagatgacgacgaagacgagtaattacgccgcggcgatgattttaatctcaactttatactgcggcttcatcagggtcgcctgtacggtgcagcgcaccggcgcgtgaccggcgactacccaggcgtcccaggctttattcatcgccgcaaaatcatctttattggcgaggaaaatggtggcatcaagaatacgtgacttattgctgccctgtttttccagcaccgcgtcaatttgcgccagggtgttggcagtctgctcaaacgcgtcggcgtcgaggttttccggcaccccggtgtagtagatggtctggttgtgaatcaccacatcagaccagcgggcttcggcatcaatacgcgtaattgtcatttatctttcctctttgttctatccatttggctgcggcaagactgccacaatgttccgcccgcgtcactacccgggctggcgaaacgccgtcctccctgacataatcactgtccaaataaccagggggcaacgtgatcgacgattttgcagcagacggccagctggccatggcgataccgggatttaagccgcgcgaaccgcagcgccagatggcgatcgcggtaagtgaagccattgaagcctcccggccgctggtggtggaagcagggactggcaccggtaaaacctacgcctatctggcgcccgcgctgcgcgcgaagaaaaaggtgatcatctccacgggttcgaaagcgctgcaggatcagctctacagccgcgacctgccgaccgtcgctaaagcacttaaattcaccggcaaactggcgctgttaaaggggcgctcaaactacctgtgccttgaacgccttgaacagcaggcgctggcgggcggcgatctgccggtacaaacgttaagtgacgtaattcttctgcgctcctggtctaatcagacgcaggatggcgatatcagcacctgcgccagcgtcgccgaagattctcaggcctggccgctggtgaccagcactaacgataactgtctcggcagcgactgcccgttatataaagattgctttgtggtgaaagcgcgtaagaaggcgatggatgctgatgtggtggtggtcaaccatcacctgttcctggccgatatggtggtgaaagagagcggctttgccgaactgatccccgaagcggaagtgatgatcttcgatgaagcccatcagctgccggatatcgccagccagtattttggccagtcgctctccagccgccagctactggatttggccaaagacatcaccattgcctaccgtaccgaactgaaagatacccaacagctgcaaaaatgcgccgatcgtctggcgcaaagcgcgcaggatttccgtctgcagttgggcgatccgggctatcgcggcaatctgcgcgaactgctggcggatagccacattcagcgcgcgctgctgctgctcgatgacgcgcttgaactgtgttatgacgtcgccaaactctcgcttggccgctcggcgctgctcgacgccgcctttgagcgcgcgacgctctaccgtggccgcctgaagcggcttaaagagattaatcagccgggctatagctactggtatgaatgcacctcgcggcattttaccctcgccctgacgccgttgaccgtcgcggagaagtttaaagaggtgatggcgcaaaagtcaggaagctggatctttacctcggcgacgctgtcggttaatgacgatctccaccactttaccgcccgcctcggcatcgatgacgcgcagacgctgctgctgccaagcccgtttgattatcaacatcaggcgctgctctgcgttccgcgcaatttaccgctgccgaaccagcccggcgcggcgcgccatctggcgtccatgctgaaaccgctgatcgaagctaacgacggccgctgctttatgctgtgtacctcgcacgccatgatgcgcgacctggcggagcagttccgcgctaccatgacgctgccggtactgctgcaaggggagaccagtaaaggtcaactgctgcagcagtttgttagtgccggcaatgccctattagtggcgaccagtagcttctgggaaggggtcgacgtgcgcggcgacgcgctgtcgctggtgattatcgataagctgccctttacctcaccggacgatccgctgctcaaagcgcgaatggaagactgtcgactgcgcggcggcgacccgttcgatgaagtgcagttgccggatgccgtcattaccctcaaacagggcgtcgggcgcctgatccgtgatattgacgatcgcggcgttctggttatctgtgacaaccggctggtgatgcgcccttacggcgccgtgttcctggccagcctgccacccgcgccgcgtacccgcgatatccgccgggcagtgcgctttctcgctgtaccgccggcaaggtaatccgtcgcaaaatgtggtaagctgcgcgccattttgtaaatcagctatccccaatggatttcgggcggtgcggcggcggtgagtccgtcagtcgatgaatttaccgccctaaagcctggaatatgtaacgagagcgtgaccacccatgcgaattttggctatcgataccgccacggaggcgtgctccgcggcgctgtggaatgatggcgcccagagcgcccattttgaaatttgtcctcgcgaacacacccaacgtatcctgcctctggtgcaggaggtcctcactgaaagcggcactacgctgaatgaactggacgcgctggcctttggccgcggtccgggcagctttaccggcgtacgtattggtatcggtattgcgcaaggactggcgctgggcgctgagttgccaatgatcggcgtctctacgctggcgacgatggcccagggcgcgtggcgcaaaaccggcgctactcgtgtgctggcggctattgacgcgcgtatgggcgaggtctactgggccgagtatcagcgcgacgaagatggcgtctggcacggtgaagaaacagaagcggtcctcaaaccggctgcggttgccgaccgtctggcgcagctttccggcgaatgggctaccgtcggcaccggctggcaggcgtggccgggtctggcgaaagagagcgggctgaccttgagcagcggcgaggtcgaactgccggcggcagaagatatgctgccgctggccattcagctgctggcggcgggaaaaaccgtggccgttgagcatgcggaacccgtttatttgcgaaacgaagtggcgtggaagaaacttcctggccgcgagtgaatctcagtagagagaagactgagagaaggagtcgcattatggcgggtcaaaaacagggcgttcgttggctgttagccgcggcggttgccgttgcgctaagcggctgcgtatcggtgccggatgctattaaaggcaccagccctacgccgcagcaggatttagtgcgggtgatgaacgcgccgcagctgtatatcggccaggaagcgcgttttggcggtaaggtcgtcaacgtgcagaaccagcaggggaaaacccgcttagagattgccaccgtaccgctggatagcggcgcgcgaccggaactgggcgaaccttcgcgcggccgtatcctcgccgacgtgagcggtttcctcgacccggtcgatttccgtggccagttggtcaccgtggttgggccaattagcggcgttgtcgacggtaaagttggcgcaacgccgtataaattcatgttgatgaacgccaccggctataagcgctggaacgtggtgcagcaggtggtgatgccgccgcagcccattgacccgtggatgctcggccctcgcccctggggctacggatacggcggctggggttggtataacccgggcccggctgaggtcagaaatgtcgtaacggaatgattttgttgtttttataatggaatagaaacagcggctagcccgctgtttcgtgtttttaagtctcataagaaaaataaatagtgacgcgcttcgcaacctgaaaaacgcctaattaataaactggtacgccgagttaatataatgttaacaaaatgtttgttgatcaggggctgtgatgacgacgaataactatttcagaggtgaagcagtgaaaaaggtttggctaaaccgttatcccgccgatgttccggcggagataaatcctgaccgctatcaatccctggttgaattgtttgaacacgccaccacccgttatgccgatcagccggcatttatcaacatgggcgaggtgatgacctaccgtaagctggaagagcgcagccgcgctttcgccgcttatctccagcaaggtttagggctacagaagggcgatcgcgtcgcgctgatgatgcctaacctgctgcaatacccggtggcgctgtttgggatcctgcgtgccggaatgattgccgtcaacgttaacccgctgtataccccgcgcgaactggagcaccagctcaatgacagcggcgcggcggcgattgtgatcgtttccaacttcgcacataccctggagaaagtcgttgataaaacccaggtaaaacacgtcatcctgacgcgaatgggcgaccagctctccaccgctaaagggacgttggtcaactttgtggtgaagtacattaagcggctggtgccgaaatatcatctaccggacgccatctcatttcgtagcgccctgcagcatggctaccgtatgcagtacgtgaagccggaaatcgtcgcggacgatctggccttcctgcagtacaccggcggtaccaccggcgtggcgaaaggggcgatgctgacccaccgcaatatgctggctaaccttgaacaggtgaatgcgacctacggtccgctactgcaccgcggtaaagagctggtggtgaccgcgctgccgctctatcacatcttcgctttgaccatgaactgcctgctgtttatcgaacttggcgggcagaacctgctgattaccaatccgcgcgatattccgggtctggtaaaagagctggcaaaatatcctttcaccgcgatgaccggggtgaataccttgtttaacgcgctattgaacaataaagaattccagcagcttgatttctcttcgctgcatctttccgccggcggcggcatgccggtgcagcaggtggtagcggagcgctgggtgaaactgaccggccagtatctgctggagggttacggcctgacggagtgctcgccgctggtgagcgtcaacccgcatgatatcgactaccacagcggtagcatcggcttgccggtgccatcgaccgaagccaagctggtcgatgatgacgataatgaagtcgcgccgggtgagccgggcgagctttgcatcaaagggccgcaggtgatgctgggctactggcagcgtccggatgccaccgatgaaatcattaaagatggctggctgcataccggcgatatcgcggtgatggatgatgaaggcttcctgcggattgtcgatcgtaaaaaagatatgattctggtttccggttttaacgtctatccgaatgaaatcgaagatgttgtgatgcagcactccggcgtacaggaagtggccgccgtcggcgtaccctccggcagcagtggcgaagcggtaaagattttcgtggtgaagaaagacgctgcgttaaccgaagaggcgctgattactttctgtcgtcgccatttgaccggctacaaagtgccgaagctggtggagtttcgtgatgaactgccgaaatccaacgtcggcaaaattttacgacgagaactgcgtgacgaagcccgtgctaaagtagacaataaaggctaagcaacgagtgagtcgccctgcgccggctaagccggcgttttttatgggcgcaagttaagagagtatgatttgaactatcagatgatcaccaccgacgatggcctgcgcgctatctgtgaagcggcaagttcggcacccgcggttgcgctggataccgagtttgttcgcacccgcacctactatccgcagcttggtttgctgcagctgttcgacggcaaacaggtttctctgatcgatccgttgaccattaacgactgggcgccgatgcgcgagctgctgcttaaccaaaatgtcaccaaatatctgcatgcgggcagcgaagatttagaagtcttcctcaacgcgttcaacctgatgccacagccgctgatcgacacccagattctggccgctttctgtgggcgtccgatgtcgtggggctttgcttcgatggttgaagagtattccggcgtcgcgctggacaaaagcgaatcacgcaccgattggctggcccgaccgttgaccgagcgtcagtgcgaatacgcggccgccgatgtctggtatctgttgccgatcgccagcaaattaatggcggaaaccgaccatgcgggctggctgccggcagcgttgaacgagtgccacctgatgcagcagcgccgtcaggaagtccttgacccggcggaggcgtggcgggaaatcggcaatgcctggcaactgcgtacacgtcagctgggctgcctgcagttgctggcggagtggcgtctgcgcaaagcgcgcgagcgtaacctggcggtgaactttgtggtacgcgaagagcatctgtggagcgtggcgcgctatatgccgaccagcctcggtgagcttgatagtctgggtttatccggtagcgaaattcgcttccacggcaaaacgttgattagcctggctgagaaagcgcaggccttgccggaatctgcgctgcctgagccattgcaaaacctgatcgatatgccgggataccgcaaagcctttaaagatattaaagcgctggtacaggaagtgagcgccgagaagggcgtgagcgccgaactactggcgtctcgccgccagatcaaccaactgctgaactggcactggcagctgaaaacgaaaaacggcgagccggagctggtttccggctggcgcggtgaattgatggccgagcgtctgaacgcgctgctcaacgactatcctcgctagcgcctggtgtcattcaggccataaaaaaccggccgcgcgttgcgtggccggttttttttaatgctacggcgagatgccgttaatgcgacaacaaggtcagggtttcgactcttcagcttctggcagggtcacgttcagctcgagaatcgaaatatcaccatcacgctgttccagctgaacgctgaccatctcagggtctatctgcacgtatttacagatgacctccaggatatctttgcgcagctgcggcaggtaatgcggttccgcgtcgccgcggcggcgctccgcgacgatgatttgcaggcgttctttcgcaatgttagccgtgttcttttttcgcgagagaaaaaagtcgagtaatgccataatttatcctccgaacaggcgtttgaggaaacctttcttctcttcttcgatgaagcggaaaggacgttcttctccgagcagacgatccacagtatccgcataggctttacccgcatctgaaacggtatccagaatcaccggctcgccctggttcgatgcgcgcagtacagactgatcttccggaatcacgcccaccaggttgatgcgcagaatttccagcacgtcttccatgctcagcatgtcgcctttgttcacgcggcctgggttgtagcgcgtcagcagcaggtgctctttaatcggctcgtcgccattttccgcgcgacgggatttggaggccagaatgccaaggatacggtcggagtcgcgtacggaggagacttccgggttagtggtgatgatggcttcgtcagcgaagtacagcgccattagcgcgccggtttcgatgcctgccggggagtcgcagacaataaaatcgaagtccatctttttcagttcttccagaactttatctacaccttcgcgggtcagcgcgtctttatcacgggtctgagaagccggaaggatatagagattttcagtacgcttatctttgattagcgcctgattgagagtggcatcgccctggataacgttgacgaagtcataaaccacccgacgctcgcatcccataatcaggtcgaggttacgcaggccgatatcgaagtcgataacgacagttttctttcccttctgggccaaaccagtagcgatggccgcgctggaggtggtcttaccaacgccccctttacccgaagtcacaacaataatgcgtgccatagaaattccttgttaaaaagggattaattgaacggttgaattgtcaaagcgccgtcgcctaaacgcaggcgcgccgctttgccataaaattcagctgggatgttatcgctcagccaatattcccctgcgatggacaccagttccgccgagaggttagtacaaaatatttgggcatctctgtcgccgcttgcgccagccagcgcacgtccccgcatcatgccatacacatggatgttaccatcagcgataagttccgctccggcactcacatggtttgtaacaattagatcacagtgtggcgcataaatgcgctgaccggaacgtaccggcagatcaatcaaacgcgtttttgtgatcggcgtagcaactggtggcggttcaacgggttccggcggcggcgcctgacgaacgattttctcttttccttccgtcagtagcgggatcccggcgcggtcgatttccgttttcaggcgggaaattttacaaccgctcacccccatgatgcgtaaaccggtggcgacgatagcttcatgcatcgggcgccagtcgacgctctcttcaatactgctgatgttgaccacgaccggtgcatgacgtaaaaaagcgggagcctgggcgattttgtcttctaacgcctgacgaataacctcgggatttgcatcgtgcaaatgaacgacagataaggtgaagctactgcccttaagttcgattggcgtatttgacatcctggccttactcaatttgctgtttatcatccgccgaagtgcggtgatattccgaagactaaaaggcatgttatagtcactcatatattgaggcaagtgaccacgggtctaattccgagtaaaactatgttttgtgtgatctatcgaagtactaaacgtgaacaaacctatttatatgtcgaaaaaaaggacgatttctcgcgcgtcccgccggaactgatagcaagcttcggcaccccgcagatgaccatgttgctgccgctcgacgggcgcaagacgctggctaacgctgacctcgaaaaagtaaaacaagcgctcgtcgatcagggctattacctccaacttcctccccctcctgagaatctacttaagaaacacctcgcggaacaggggaataaatccgattaacccattgagggaaaataatgtaccaacatcataactggcagggtgagttactggattatccagtgagcaaagtggtttgcgttggcagtaattacgcaaaacatattaaggagatgggcagcgcgatgccggaagaaccggtgctgtttattaaacctgaaacggcgctatgcgatatccgccagccgttggtactgcctgaaggattgggctcggtgcatcatgaggttgaactggcggtgctgatcggcagcaccttgcgccaggccagcgaagaccacgtgcgtaaggcgattgctggttatggcgtggcgctggatctcaccctgcgtgatattcagggcaagatgaaaaaggccgggcaaccgtgggagaaagctaaggggttcgataacgcctgtccaatctccggttttattcctgtcgccgagttcaacggcgatccgcaaaatatgccgctaagcctgaagattaatggtgaagttcgccagcaggggacgactgcggatatgattcataagatcgtaccgctaattgcctatatgtcgcgcttctttacgctgaaagcgggcgacatcattatgaccgggacaccggagggggtcgggccgctcgccagcggcgatgagctggaagtcggcttcaatggtttgacgttatccacccgcgtgctgtaacgtccgcttgccgccttttggggcggcaaaacttgcatcggcgtgccagactggttataaggtgcaccctgaattgtaatgacggacatcccaatgagcgaacaacctttctggcaacaaaaaacactggatgaaatgaccgacgcggagtgggaatcactgtgcgacggctgcggacagtgctgcctgcataagctgatggatgaagataccgacgagatttactttaccaacgtcgcctgccgtcagctcaacattaaaacctgccagtgccgtaactacgagcgtcgcttcgagtacgaaccggactgcattaaactcacgcgtgataatctgccgaccttcgaatggctgccgcacacctgcgcctatcgcctgctggcggaaggtaaagcgctgccgcactggcacccgctgctgaccggctcaaaagtggcgatgcacggcgaacgtatttccgtgcgccatattgcggtaaaagagtccaccgtcgtcgactggcaggatcatattttaaacaaaccagactgggcgcaatgacacgttgaaatgaaagggaaaaatggttactgatttagtgcctggggcatggatggggcaaaacctccaaaatttgcgttgagtatcgccatctgattactgttgttgtcagtcatctattgtccgtaaacgttgtaaaccatttgcgctgacgtgtggccctgctgtgaggcaatgaagttgaaactgtgataatagcactaaagtgtatgatggttttaaccagtatgtacatagtgtaaaggttatgccgctaacattaaaacggctgacggtgaaactcagcaaaagtaggtgcgaaaaaaatttaaacaataacttcaggataattatttactggccttgggtgttaaatactagagaggaagcgagtacttttttgttaagcgatgggagcaatatcgcccccatcaagtttaacatcatgcaacttctttaactttgctggatgtaggtttgataattttcctgcctatagctatgccttttacttcgacatttttataaagccaggttgatataacataagtaatcggaactgatattgcagtcgcgataataaatctcaatatagggttgagatttataaatgttggatactcaataagtatacctattgttggaagtactatcatcaaatggagtaggtatactgagtatgagacttcaccaagaaatcgactaagctttatggatagaaacgcttttgtggtatctgctatcaatttgaatggggatttatttttatgagggtaaagtaaaatggccatgcctgctacaataattatctcaatcaccattctggtaggtgtgattaggaatccgatgcccaaggcgctgattggtgcaattaaagctatcagtgaataatatattttactatccgatgctgccttatatataagcattccagcaatgtaatagaggaagtttgaaggcaatcattgatggcctggtgaattcattaaaatatccaggcgccagttgcgaggcaacaaaacaacttgccattataaataatgatgtcttaatatacccaaaacgcataattattaacattatgaaggggaatagagcataatactgcatttcaagaccgatactccagtctggtattgttgttctggcagaataataggggagaaaaccaaaagcaaaagaaatatgtgcgaagaaattaactatggaagtatcagcgtacttttcaggatcagtttgcgttgaggcccatacgttaccaatagcttctctgtaattaccgaattgctcgcctaagagaagtgcgatgataagtaaaacataaaacaatggggcaattctgaaaaatctccgcatccagaatgatgtcattgtttttactgagttccatggttctacatgctgcctctcagtgtaatttttagccatcagatagccagataagagaatgaaaatatcaacaccaatgctagggctacttaaaattggaatattgcattccgttaaattacatagatgaccaagcacaacccaaagtgacgcataacctcgcaaaccatcaagctctggagaccaatttttgctctgagacatttgctttaccagtgagattaaattgaaatggttactcaatggtaacaaaaaggtaagttaattgtaagtatttattttgctgcgtctggttttgtaactatttgttttatatataaatttatatcccatgcattaattgtggggaaattgccatatgttaccgggttagaaaggagttatatgtagttaggatgatttaattattttgctacattacttttatgcgttgaagatggtaagaagtaaataacctatcgattcttgatggagctatcaatataagctctgaggattttactccagacttcgtatccagaggtattaaggtgagtgccatccgatgtatactccatttttaaaacaccatttggcgataagatagagtttaaatcaaggaatggggttcctgatttacctgagaaggctttaagtaagtcgttaattttattgattgacgtattttttcttttcctcttgtcgccagagagaattgtagactggataaccacattaatgtttttttgtttcatatgattagtcatgagaataatgtttttagcaatttcttcaggagggacttttctggttacatcgttagtaccagccattataaacaccgttttcgcgccagtcctttcaatgtcattaatcctgtcaagcatgccggaagtgtcatctccgcttatacctcgatttcctattaagtagccggggattaagttattccattttccatttttagttatgctatcgccaaacataatataatcatattttccagggtgttgggaatatgtttttttgacatttaaatatgcggcactgttctttactgaagtatctgcattagagtgattacaggaaaagcatataaaaagtaaggttgctataatatttgagtgtttaaatttcataattcccattttaatcttaataaactatgcacttaaagctattatgaattatttaatgtgcactaattgtattcgattagtcaacgtttatataaaggttgttatgtttttcggaattgttgagacggactgtgcaggaaaggttatccatttggtgactcattactcataatgagaagccagtgaggcgatggatgtcgattccatctcatcccccctgaaatctgagaatgccatatcagacaagaatgtcagggtcgtacgccttatgaaaacgatgcgaaccctttcatccgacgtgagttagattaccaggtgaaatatgcgggcgtttgatgaaatatctgggcttgagccagttatcaaccacgtaaaattacatatcgaacgcccacaatgcgtcagaactcatcattataacggtgggatgaccacccttagagtaggtaaaaaaggtagcaaatcctaatgtaaaacagaaggttagaattacttaaacacgacaaaatatcaaaaccgggcattcccctgccctgcgcggcccggttctttgttcgccattaatatcccatcattctcaatgccagccagataatccccgcccacaagaaagcgcatggaaaaataacaacactaagcgaacgccagccgtttctactcatcggaaaccccacatttaagtcatcatcaccaggtgtgtttggcatttcatcatcggcgcgggggcggggaactttaggaatatttgtaaagcagttgtagaaaaaaatagacccggcgcggtggccgggctgagagggcgttgacgagctgccaggtcaccccggcgcggtgactgcttgcggcgatcagatgggcaggaaactcatcattaaatacgcgacgacaatgcagattagcgtcatataccagactatgctcatggtgacttatcccatttcagactcaaacaagacgagcctttcggataacgactttaaacatccggacgtcgatgatcaaccgcttgcgcatcaggggattagcttttctttgcgtggaacaggccgtcttcgccgtggctttcatcctcaacccagaagttaatattgaactgggcatcatcgctgagctcgatacggtgccaatactgcggtgggctggtggcgaactgcccggcgttaatgacgaccttcacctccggctcggtagcctgctcgtcatgaaaaccgtagtaagttaccgttccttccatgacgcacagctgaccgaaaacgttagcggcagtattgtgatgggtgagcagcgccgccggaacattttccttagtgaagaacggagtggagcgtttaactttccagttagccgggatacgcaggtgagacatggtgagctcctcagtggatgcatataaagtgtatttaatatgcatctttaaaggggcgtcgtcaacttacaggcataaaaaacgcccccgaaggggcgtttactatctggcaggataaattaacggccgaacagatcgcgttttttagccttaaatggctgagcgatcagcaccagcagaccgatgaccagataagcggcaaagatgcctaccagccactgcggcatctccagcgtcaggaattcccactggcgcacggagcagtcgccggtggcgacgaatacctgcggcagccatttatccagcggcagccacgtcgggaaacgcgcggcgaaatcgcaggtctggaacggagaagggtgcagctgaatcatggtgtgctcccaggctaactgtagaccgcgcagggcgctgtacagccagatcagcagcgcgacgtagcgcaacggggttttcggcgcgatagcgcccaccagaccggcgcccataatgccaaacagagcgcagcgttcataaatacacaacacgcagggctgcagcagcatcacgtgctggaaccacagcgccactaattcaagtataaaagcggttaacgccatcaagagccaggcgccgcgtccccgtgagcactggtttaagtattgcaacataatcatttccctggaacatgctaaatcatggcagtgtaaacgaaaactaccgcgacgccatccgctagtcggaaaatattacgtaaatgaatattcgttacccggggtgaacccgggtaacgggctgcgcaattacggcagtattggggtggtcaaccagccgtggctgagcatccactgggtggccggcatcaacagggtttcgacgcacagcaggccgaccagcgttaacacgatggtataaggcagcgccatccacaccattctgccataagagaggcggatcagcggcgccagcgccgaggtcaacaggaacagaaacgccgcctggccattgggggtggcgacggaaggcaggttagtaccggtattaatggcgaccgccagcatttcaaactgctgcaggctgataacgccatgctccagcgccgcttttgcttcgttgatatagaccgtaccgacaaagacgttatcggagatggacgacagcaggccgttaaacagatagaacagcgatagctgagcgtgcggcgaagcctgcaggacgaactcaatcactggggcaaacagatgctgatcgataatcaccgccacgatagcgaaaaacaccgtcagcagggcggtaaacggcagcgcttcggtaaaggctttaccgatggcgtgctcgtcggtcacgccggaaaaggtggttgccagcacgataacggagaggccaatcaggccaacttccgccagatgcagggcgagggcggcaatcagccacacgccgatgataccctgggcgataaggcgcatccgatcctggcggctgcggctctggcggctacggtcgtcgaaatcctgcaataccttgcgcaccggtattggcagcggctcgccgtagccgaacagacgaaatttttccagcagcaggcaggtcatcagaccgcacaggataaccggcagggttactggcgacatccggataaagaactcaccgaagtgccagccggcggctttggcgataatcaggttctgcggttcgccgaccatggtcatcacgccgccgagggcggtaccgacgccggcgtgcatcatcaggctgcgtaaaaagctgcggaactgttcgagcacgtcgcggtaatgctgatcgatgtggctgtcatcaagcatgtcgttatcatcaggccgcgcggaggcgacgcgatgataaatgccgtaaaagcctactgccacgctaatgaccaccgccacgacggtgagcgcgtcgaggaaggcggagagaaaggcggccgcaaggcagaaggccagcgacagcagcatcttgctgcggatccccagcaacagacgggtaaaaataaacagcaatagctgcttcatgaaatagatcccggccaccataaacatcagcaatagcaggacttcgagattattggctatctcttcgcggatatgttcggggctggtcataccgatcagcaccgcttctatcgccagcaagccgccaggcagtagcgggtagcatttgagcgccatcgccagggtgaagataaactccaccactaacagccaaccggcaacaaatggttgcagataaaacgccagcgggttaaccaccaggaagataatcaggagaagcttgtaccagtctggcgactggccaagaaaattgcgccacagggcgcggccataagacatttccacgacagaggtccttccgtcaaacaacatgattttatgcgtaactattgcaagattaccagttgagtaaaaagggaagcaactttcttcgcggcgcatgacaggtaatggaaggcgttaagcaaaagctgaaaatgaaacggcgatccccttttaattactttcagatgctatctggcgtatgactgctctggtatgatgagtgcaatttgcaacgctgtgtaatggaaatcttactatggtcattaaggcgcaaagccctgcgggtttcgcggaagagtacatcattgaaagtatctggaataaccgtttcccgcctggatctattctccctgctgaacgtgaactttctgaactgattggtgtgacccgaacaactctgcgcgaagtgttgcaacgtctggcccgtgatggctggctgactatccagcacggtaaaccgacgaaggtgaacaacttctgggaaacctccggactgaatattcttgagacgctggcgcgcctcgaccacgatagcgtaccgcaactgattgataacttgctgtcggtgcgaaccaatatctcgacgatttttattcgtaccgccttccgccagcacccggacaaagcgctggaggtactgtctaccgcccgtgaagttgaagatcatgccgacgctttcgccgaactggattacaacatcttccgcggtctggcgtttgcctccggcaaccccatctacggtctgatcctcaacggcatgaaggggctgtatacccgcattggccgtcactattttgctaatccggaagcgcgtagcctggcgctgggtttctatcaccagttggcgaaagtgtgcgaagagagtcagcacgataaagtgtacgaaatcgtccgcgcctatggccataacagcggcgagatctggcatcggatgcaaaaaacgctgcccggcgatttagccattaatatgcgctaagtacggctcactctataaaaatgcccggataatccgggcatttttttttagccttacagcgcgttctgccgcggcggcgtgcgatccaacagctcaacgctgccgtcggcattctgctgctcaaggatcacgtcaaagccccacaggcggtgaacgtgtttgagtacctcgcggcggctcttatccagcggcacgcggttgtgcggcacatagcgcagcgtcagcgaacggtcgccgcgcaggtcaacgttccagacctgaatattcggttcgaggttgctgaggttatactgcgccgacagcttagaacgaatttcccgatagccttcctcattatgaatggcggaaatctccaggtaattattgtggtcgtcgtcgagtacggtgaacaagcggaaatcgcgcatcaccttcggcgacaggaactggctgataaaactctcatctttaaaatcgcgcatggcgaaatgcagcgtctccagccaatcggaaccggcgatatccgggaaccagtagcgatcttcttccgttggcgactggcagatacgtttaatatcctggaacatggcgaaacccagcgcgtaggggttgatcccgctgtaccacgggctgttgtagggcggctggaacaccacgttggtgtggctgtgcagaaactccagcataaagcgctctgtcacttctccttcgtcatacagatgattgaggatagtgtagtgccagaatgtcgcccaaccctcgttcatcacctgagtctgtttctgcggataaaaatactggctgaccttacgcacgatacgcaggatctcgcgctgccaggactcaagcagcggcgcgttcttctccatgaagtacagcaggttctcttgcggttcggaaggataacggcggctcgcctcgatggctttttcctcttcccgttttggcagagtacgccacagcatgttcacctggctttgcagatactcttcgcggcttttctgtcgcgccttctcctcctgcagcgatattttctgcgggcgtttatagcggtcgacgccgtagttcattaaggcatggcaggagtcgagcaatttttcgacttcatcgacgccataacgctcttcacattcggtaatgtatttacgcgcaaagatcaggtagtcgatgattgagctggcatcggtccagctgcggaacagatagttgtttttaaagaaggagttgtgcccataacaggcgtgcgccatcaccagcgcctgcatggtaatggtgttctcctccatcaaataagcgatacaagggttggagttaatgactatctcataggccagaccttgctgaccgtgtttatatgcctgctcggtttcgataaattttttgccgaacgaccagtggggatagttgatcggcatcccgacgctggagtaggcgtccatcatctgttcggaggtgatcacctcgatttgatgcggataggtgtcaagacgatacagcttcgccacccgatcgacctcggcgagataggtttccagcagttcaaaagtccagtcgggtccatcgcttaaccgggtggtgtccctgttcatggaatcaatcgtagccattagcgcgccctcgttgttggtggttctctctttgtggagaacctcttatcaagcatagaacacgccataacaaactgcgtctgcgggtaatttcttttcttcgcgatttcacaatcctaaaggccttaatttaacatttgagcagcattttatactgaggaaaaataaagcgcagcaggagatcgtaaatctctggtgtcagtgctggtgcggtttggtgtgagataagtcaccataaataaagcgtatgttgaataatattttcatctgggttatcaatttgtaattagatgattgttctttaactattacggagtggctatgcgagtcgtcatactgggaagtggggtggttggggtagcgagcgcctggtatttaagccaggcgggacatgaggtgacggttatcgaccgtcagccagggcccgctgaagaaaccagcgccgccaacgccgggcagatctctcccggctacgcggcgccgtgggcggcgccgggcgtgccgctgaaggcgattaaatggatgttccagcgccatgcgccattggcgattggccttgacggcacgcagttccagctcaagtggatgtggcagatgttgcgtaactgcgatacccgccactatatggaaaacaaagggcgtatggtgcgcctggcggaatatagccgtgattgcctgaaagcgctgcgtgaaaccaccggtatccagtatgaaggccgccaggggggcaccctgcagcttttccgcaccgaaaaacagtatgaaaacgccactcgcgatatcgccgtgctggaagaggccggtgtgccgtatcaactgctggaagccaatcgcctgcgcgaagtcgaaccggcgctggcggaagtcagtcataaactgaccggcggcctgcgcctgccaaacgatgaaaccggcgattgccaactcttcaccacccgtctggcggcgatggccgaggcggcaggggtgactttccgctttaataccgccgtcgatgcgctgctttacgaaggcgatcaaatcgccggtgtgaaatgcggcgaggaaattattaagggcgacgcctacgtgatggcgtttggttcttactccaccgcgatgctcaaagggctggtggatatcccggtctatccgctgaaaggctactcgttgactattccgattgccgaagagagcggcgcgccggtatcgactatccttgatgagacttacaaaatcgcgattacccgtttcgataagcgtattcgcgttggcgggatggcggaaattgtcggcttcaataaagagttgctgaagccgcgccgcgagacgctggagatggtggttcgcgatctgttcccgcgcggcggctacgttgagcaggctaccttctggaccggcctgcggccgatgacgccggatggtacgccggtggttggccgtacgccgtacaaaaacctgtggctgaacaccgggcacggtacgctgggctggaccatggcctgcgggtccgggcagcttctgagcgacttgatttcccggcgtacgccggcgatcccttatgatgatctggccgtggcgcgttacagcccgggctttacgccggctcgcgctcagcatttgcacggcgtgcataactaaggagcctccatgtctcgtccggtaaaagccagcattgatctgtcggctttacgtcagaatttacagattgttcgccgcgccgcccctggggcgcgcgtttgggcggtggtcaaggcgaatgcctatggccacggcctggcgcggatgtggcaggcgctgaacgccgcagatggatacgcattgctcaatctcgaagaggcaatcctgctgcgggaaaagggctggaaaggaccgattctactgctggaagggttctttcacgccgatgaactggcgctgcttgataagtatcgtctgaccaccagcgtacacagcaactggcaaattaaagccctgcagcaggctaaactgcatgcgccgctggatatctatcttaaagtgaatagcggtatgaataggctgggctttatgcccgagcgagtgcataccgtctggcaacagctgcgatcgctcgccaacgtcggtgaaatgacgctgatgtcgcaattacgctgatgcggaaaacccggagggcatcgcggagcccatgcgccgtatcgaacaggcggcggaggggctggactgcccgcgttcgttgtcgaactcagcggccacgctgtggcatccggaagcgcactttgattgggtgcgtccgggaattgtgctgtatggcgcatcgccgtcgggccagtggcgggatattgccaatagcggcctgaaaccggcgatgaccctcagcagtgaagtgattgccgtacagacgctgaaaagcggcgaacgggtgggttacggtgggttgtatcaggccgcaggtgaacagcgcatcggcattgtcgcctgcggttatgccgacggctatccgcgcgtcgccccaagcggcacgccggtgctggtcgatggcgtacgcaccaccaccgtcgggcgtgtttcgatggatatgttggcggtagatctgacgccttgcccgcacgcgggtattggcgcgccggtcgagttatggggacaggagattaagattgacgatgtcgctgcggccagcggcaccgtcggttatgaattaatgtgcgccctggcgccacgcgtgccggtagtgacagtgtaactttgtgtgaggcggatcactccgcctcatcttccgcgacccgcacacccaccttcagtacgtgatcgtcctctttttccgcgaccgtccacaccataccggcaaactccacctgatcgccaacgaccggcgcggcgcctaacagttgctgtatcacatcacccagcgactgctgatgctcgcgaaactcctcgccgccgtcgaggccgtagatctgcgccacgtcggcgaatttagcttccgcatcgaggatgaagtcgccaaagaatcgctgatcgagagaaaccgggggcgactggctaaacattttacccagcgccggcaggtcgcgctcgcggccgataacacaaagaatatcgccatccatcagccgcgtgctgccggtaggatgcagcagtacgttgtcgcggaagagtgccgcgatgcgcgtctccggcggcatgtgcaggtcgcgcaacgctgcgccaacgcaccatttatcatcacccaactggtagacaaactgttcccacggattttccggatggatatccagcccgacgcgtgagataggccagccgaccggtggtactacgactttcgcttttttcgccgcccaggagagtgaggtgccctgaagtagcagtgaaatcaacaccacgaaaaaggcgacgttaaagaacagccgcgcgttctcaagcccggccatcatcgggaaaacagcgaggataatcggcaccgcgccgcgcaatccgacccaactgataaacactcgctcgcgcagattaaaaccgcggaacggcagcaggccggcgaataccgacagcggacgcgcgatgaagatcatccacattgacagcagtagcgccggaatcgcgatcggccacaggtcggacggcgtcaccagcagacccaggacgaggaacatggcgatttgcgccagccacgccaggccgtcaaagttttgcaaaatgccgtggcggttgcgaatgggtttattaccgagcaggaaaccgcagagatagaccgcgaggataccgctaccgttaagagaggtggtgacggcgaaaatcatgatcccgccgcttagcgccagtagcgggtagagcccggtgggcaggacaatacggttaatcatctgcagcagcaaatagccgccgccaagaccaatagcgatgcccagaccaaactgttgaatgatatgcaccacaaacatccagctcagaccggcttcatgctgctggatcatttcaatcagggtaatggtgaggaataccgccatcgggtcgttactaccggattcaatttcaagggtcgagccgacgcgctcgttaagccctttaccgccgagcagcgagaagaccgctgccgcgtcggtggagccgacaatggcgccgatcagcagcccttcgattaaatcgagcttgaacagccatgccgccatcatcccggtaagggcggaggttatcagcacgccgaccgtcgccagcgatagcgctggccagagcgccacgcgaaacgaactggcctgggtgcgcataccaccgtccagcaggatcaccgccagcgcgaggttactcaccatataggcgaagggatagttatcgaaaggaatgccgccgataccgtcaacgcctgccagcataccgatagcgaggaagataaccagaatcgggatgccgaggcgtgaggagaaagaactcaataaaatactgcaggttactaaaacagaacccaggataaacagactaatgaccgcagcggcgtccaatgttcacgtactccttgtcagcgtgaaggggtgaaaattacaccattttaacaatccgcgcgttttcaggatactcgcgcagaggaatttttattccgccagcaccggatggccgcttatcgttaacgttgcgacagaggcgttgttgaccagccgtgcccgtgcgccgagaggcaaagtcacggtgcgctgttcatgaccgaattcgagtccggtgagcagcgggatggcgagttgctgacgtagccaggcgtagacggtgggtagatcgtaaccgtcgtcgtagtcgttgggttgcgccccggtaaagctgccgagcacaatggcccgctggcgggcaaggatcccgctgttgagcaactgcagcagcatacgctctacgcggaacgggtgttcgttgatatcctcaagcaccagaataccgccgtcaatctgcggtagccacggcgtgccgatgagcgacgtgaccatcgccagattgccgccccacagggtgccttcggcgcggcaggttgggccatcgctttgccattcgagggtaaactccggttcgcgcagcgcctgccagaagtgatgttcagtaaacgcattcagggtttcagcgccgaaattgcccgctaacatcggcccactgaagctgatagcgttggctttagccagcagtcccatctggatggcggtgaaatcactgtggccgcagataagcagcggatcctgccgctggcgcgcggacaatgcctgccagtcgatttgcggtagtaaccgggtggcgccatagccgccgcgtaccgccagcacgatgcggttttttccctcgagggccgcaagttggttaatatcggccaggcgttcgctgtcgctgccggcgaaacgctgctgtcgacgggagatcgcctgttggttcagtacctgatgaccggcctcctgcagacgggccacgccaagggccgcagcctgttgattgatacagtaaccggaaggggcgaccagataaaactgagacatggcaattccttgcaaagaatgaaagggttatcatgccgcctggaacgtgtattgtcatctccgtgcggcaaacttcagccaataaggatagatgtgtgaaattgagatggtttgtttttttatttgtattgttggccggttgtagctcgaagcacgattacaccaatccgccgtggaacccggaagtcccggtgaagcggtcgatgcagtggatgccgatcagcgaaaaagccggcgccgcgtggggggtagacccgcagctgataacggcgatcatcgcgattgagtccggcggtaatccctcggtggtcagtaaatccggcgcggtcgggctgatgcagttgaagccgtcgacctccgggcgtgatgtctatcaacggatggggtggcgtggtcagccttcggtaagcgaactgaagaacccagagcgcaatatctcgatgggggccgcttacttgagtatcctggaaaacggcccgctggcggggattaaagacccgcaggtgatgcgctatgcggtcgtggtctcttatgccaacggcgcgggcgcgctgctgcgtactttctcgtcgaatcgccaggacgctattgacgagattaacgatctcgatgccgatgagttctttgaacacgtggcgaaaaagcatcctgccccacaggcgccgcgctatatctggaaactgcagaaagcgctggacgcgatgtaattcctatccttgcgttgcctccgggaggttcccggaggcaacgttgtcagaaatcgtagcccacggttgccgtgacgctgcgttcagccccccagtaacagttgccggtgccgtagcagccggaaagatattcacgatcgccgatattattcgcgttaacctggatataggcgcctttcatcgctgtcgaccacgctccgaggtcggcgcgcgccatcgcatctagcagggtgactgacggtaaacgttcggtattggcgtcatcagcccactgtttaccgatatagcgcacgcccgcgccaacagtaatgcccgccggcaattgatagcgcgcccagaacgaggccatctgatctggcgacagctgcggcgtattactatcggtgccgtctttcgtgtcctgaaagcgcagacgattccaggtataagaggcaatagtgctcaattgcggcgtaatctggttatgtgcttccagctctacgccctgcgaatgcactttcccggcgggaatataggtggcggtggcaatgttcgggtcgcgggtggcgacatccttttgcatcaagtcgtatatcgcgatgctatacaaatcgctgctgcccggcggctggaatttcaggcctgcttccacctgttcggcggtggtaggttttaataacgtaccatcggcgcccggcagcatcgccggggtaatcgcctggctgtagcttaagtagggcgaaaggccgttatcgagcgcatacagcagcgaggcgcggccgctgatgtgatcgtcggagcggcggttcgacgtgcctgaggtgtcgctaacctgctgtgaaacgatgcggtcgtagcgcccggaaacatcaagatgccagcggttccataccatctcatcctgcagataaagcccggtctggtaataacggcggttattattatcgctgtaggtgatggtatgcccggtttgcggcgtatagccggtgaacgggttgagtggcgccgcgttgccggcgccggtccacaaatcgttgcggaagcgatgatactcagcgccgaggattagcgtatgcgccagttcaccggtcataaaatcggcgcgcaggcggttatcggttgaccaggcgtccagcgacccgcgggaaccgctgtagccgcgggaaagcatgtcgctgtcacctacccagccaacctgataaacctgatccagcgagacatttgtatgggtatagctgcccgcggagtaggccgaccagacatcgttaaactggtggttgaactcgtaactgtagatctgttcgcggcgctggtagccatcgcccggatcgccttcattggtgctgggtgaaagtttacggccgttgtgcgcgtaacgggtgccatccagcggcagagagccgtggtagccgcctgagggatctttttgcaggtaggcgcgcaacagcagtgaagtatcgctatccggctgccacagcaaggaaggcgaaatcgcgtagcgctcttcgcgggtatggtcatactgcgtatcgctgctgcgggtcatgccgatgagccgccaggcccactggtcattgatggcgtcggtatagtcaaaggccgcgcccttggtattttgcgtgccgccggtcaggcgaaagtgaccctgctggctgaactgcggccgtttggaggtcaaattgaccaccccgcccggtacgctttggccataaagggcggaagaggggccgcggatgacgtcgacgcgctcaataaaccatggatcgatctgcagcacgttatggctgccgccatcgctcatcaggcgcatgccgtcaaggaacaggttatcgacgtcgccgccgtggtagccgcgcagcgagatggtatcaaagcgcgtcgcgccgccgccaaaactggaataaacccccggcgtatactggagcgcctggcttacggtattggcgccctgatcggcgatctgctggcgggtgatcaccgataccgactgggcggtagttatcaacggctgatcggttttcgtggcgccggttgacgttttggcgctatagccttgtgtctgcgcgctggcggagtcgtcaggctttgcggtaacgattagagtatcttccgcctgcgcggcgagagggaaggcggccgcgagggcgcacaccagcgcggagcgtttgaagtaaacagaggagatcatgccataatcctgaatagcgcggtctggcactcctgtgcgccgccgcggaaataaacgaaatgctttttcgttaaaaataatgcgaattattatcgtttgcttttgcgtgatcaagcaaaatagtcctcctcagagcaagaagacattttgctggctgtcgagcggatggtggggtgacgtcgatgggaaaagcgcggcgaagatatcgccgcgcgcagggggattactgggcttttttctccggagccgccacggcatcgttcgcggctggctgttggccggtggcgctttctgtctgcgtcggtcgggtcgccggcagggcatcgcacggtttttcctgcgggcaaaccaggtcgagcatctttaatgtcacgccattggtccagccaaagccgtcctgcagcgggtattcaccgccgccgccgccggtacccgttgaactcacgtcatatttctctaccagcttctgcttgctgtcataggtgtgctggacgttgctgaggaagcgccaggtgacctccatggccacctttttctgaccgtagttctgcaggccttccaccgccacccactgcagcggcgcccagccgtttggcgcgtcccattgctggccgctattgaccgtggtcgtggtgaggccgccgggcttcagcaggcggctttcggcggcggcggcgactttcgcggcgcgttcgctggaggccgctttgacgtacagcgggaacagcgccgcggcggtcagctgattacggactttatggctcttcagatcgtaatcggcataccagccttctttatcgttccacagatatttttccagcgctttctgacgggcgttcgctagcgcatcgtactgtccggctttggcgctgtcgccagcggccttactggcgcgggcgatgattttttccatgtggaacatcagcgcattgagatcgacaggaaggatgctggtggtgcggatagtccccagttgctgcggattatccatccagcgagagctgaagtcccatccggaagccgcggcggaacgtaggtcgcgatagatttcggtggccgggcggttaggattgtttttggcggtggtgacatcgtccagccaggactccgggcgcggcgtatcgttatcatcccagtagcggttaagcagcgcgccatcttccatacgcaccacgcgtttattggccttgccgggcgttagcgcatcggcgccttccatccaatagcgatactctttttccatctgtggcagccaggtcttcagcgcccgatcgccatcgtggctggccagcagctcaaccataaaggagaagaacggcggctgcgaacggctcagatagtagctgcggttgccgtttggaatatggccccagcggtctatttcggcggcgaagttggccaccatgtcttccactttatcccagtgcccgctttcggcgaggcccagcatggtgaaataactatcccagtaataaacctcgcggaagcgtccaccgggtaccacataaggtttcggcagcggcagcagcgaatcccatttctcgacctcgacggtgctgcgggttaatactggccatagcccatcgatgtgttgacgcagggtttgtcctttcgggggtacgtattgatcgttatcacgcggcagggtgaagttgatctcaacgaaatggcgcagatcgaagctggcctggcttttttgcattcgatagtcggcaaggatcatcagcggatcgctgttcggtaccgcatcagcgaaggttttttggtcagggaagagtttcgcgctctgcacgtcgttaaacagcgggcctaatagttcatcaggcgattgcggtaccggggaggtgttgtcatctgcctgcgcggtgaatgtcgccaggcttaatattgcgcctcccagtgccagttgaataaggtaggtcagggtttccgggcgacgtagaaccgatctcgtcatcgataattctccatttttgcgttttgctgacttcgcgccactgcgaacggccatcagaaaaccttagccgaatatcggccgcttcgcgtgttggagttaacattttggccgaaaacagactatttacctggcgatgtattgtccgggggttttgccggtctggctgcggaaaaagtagataaaggcgctatcgctggcaaactccagcgcctgggcgacatccgtaatgcgttgaccgctggccaatagctcaacggctttcatcaaccgccactgttggcgccactgctgatatgacatgccggtttcacgttgaaacaggcggctgatggtcttttctccggcgccgcattgcgccgccagttgctgaagctgcggcgggtgcccatggccgttgagatggcgcagacgtttatcctgcggcagcgttagcatcatctgctcatgttttgccgcgccgatttccgccacgcagagcgccgccaggtgccgggccggaccctgttgccagtcagtatcccacgggctggcgctaatgcgttcgagcaactcgcgcagcagcggggtaacgttgaggatggccggggcggcgggtagctcgggataatgcgtattagcgaaccacaccgaacggtaatcaacgatgtgctgcatttgggcgcggtgcgtcacgcctgcggggatccacgccgcgcgggtcggcggtaacatacacaatagcgcgccatcatttagcgtcagccggatacaaccctgacgggtaaataacatctgccccatttgatgacgatgcagaccgtcgtcatgatcgccgttaagcgtggattgcacgccaatcagcggcgtattgagcgtatcagggtcaaaggatgcatccgcgctgagccatgccataatgtctgattctcgatgttaaatgtcattatatttataatcgccgtttttgccgctccctacaatggcgcctttgacgagggaggtggatatgttaagtcgttcggcgatggcgctggttaccgcattactcatgtttccgcaaatcgcggagacgatctatagcccggcgctgactgatatcagcgcacatttttccgttagcgccgccgatgcggcgcagacgctggcggtctattttatcggctttgccgttggcgtgctgttctggggctggttcagcgaccggcgcgggcggcggccggcgttattgctcggtctggcggtgtataccgcaggttgtatgctggcgctggcggcgccagattttagcgtactgctggcggctcgtatcgtggcggctttcggcgcggcaatcgggtcggtggttgggcaaacggtgctgcgggatgcgtttgatggccggaggttggcggctctcttttcttttgtcggcatggcgctggctatcagcccggcaattggcgtttatcttggcggcgtgctgacggcctggcgcggaatgaacggcgtcttcggcgcactggcgttgctggcggcggcgctgttgctgctgtgcgcggtgatcatgccggaaacccggccgccgcgaacgggggatcaggcgctctggccgttaatgctgcgcatgctggcggatgcgaaaatccgttttgcggtggcgctggtggcggcattgaatatcggtttgttcagctattacagccagggacctttcctttttgcccgcctggggctggatgcgcggacctttggctatagcggcatggcgctggcggcaggggcgttggttggcgcgcagggcaatcgtatgttgctgcgacgtggagcagggcagcggcctatttttatctgtgccggtctgctgttattgctcgccagcgcaggcgtatgcctgttagcggattcatggttctttttgctgccgatgatcgcagtggcgacagcctatgccatggcgatccccgtagtgctgggaacggcgcttagcgactacgctgattgtcgtggtagcgccggagcgctgttcggcctgacctattatttggttatcggcttggggctggcattcgtggggtgggggcaatcgctcggcgtcgcgttggcaatctgtgcggtgatttgcgcgttaaccggttggtgttatctgcgatacattgatgattagtttctggatttgtgatgattagcacaaatcactatttagcaggtttgtgagtggatgaaaaatcgatattgattttaatcaaggaattacctgctacaaaatagccaaaaaacgaggttaaaatgatgttgtaaatgataatttattgtttatttttgttttcgtctaaattaatgaaatatatctttacatacaaataaggcgaaaaattgtgacctcatcccgtaataaatcgaaataaatacagttttctcattttatttgattgtttacacctgaggtttaatcaggaattaatgtgaaatatttccttttattgcttgaaaattaccctttccctgctcgcgcttagcttaaaaattaaccttttttatccccataaatattttttatcccctcatatttctttgactaaaatcatgcttaatttcatgtttttgtttttatcttattgattttagttgttttattttgtttcatggatgaggttgattataggtgaaagtgctttgtgagtggtctcacacaaccatcggatcatcatttgatacactttccgccgtcaacaaagtcattaacgtggataaccaatatgaatactattccgctccctaaaactcagcacctggttgtattccaggaggtgatcagaagtggttcgattggttcggcagcgaaagagttaggattaactcaacctgcagtcagtaaaacgattaatgatattgaagactatttcggcactgagcttattgtccgtaaaaataccggtgttacgttgacggaggccggacaggtgctgttgagctggtcggagtcgattacccgcgaaatgaaaaatatggttaacgaaatgaacagcatgacctgcagtaccgtcgttgacgtctctttcggtttcccgtcgctgatcggcttcacttttatgtcggatatgatccataaattcaaaaagttatttcccaaagcacaggtctcgatgtacgaagcgcagctttcatcgttcctgccggcgattcgcgatggccgtctcgatttcgccattggcacgttgagtgatgagatgaagctgcacgatctgcatgtcgaaccgctatttgaatcggagttcgtgctggtggccagcaaatcgcgaacgcggagcggcagtgccacgctggcatcgttacagcacgaacagtgggtattgccgcaaactaatatgggttactacagtgaactcctcgccacgcttcaacgcagcggcatcaacaatgaaaacatcgttaaaacagactctgtcgttactatttataatcttgttctcaatgctgatttcctgacggttattccttgtgatatgaccgcaccttttggctctaatcaatttattaccattcctgtcgaggatgcgttaccggtggcgcattatgctgcggtgtggtcgaaaaattatcgcattaaaagcgcggcctcggcgttagttgaattagcgaaagaatattcagcccatagcggctgccgacgacgacaattaattaccgtggactaattgtctttttatattaattgaaacttaagctgcgatctgtttatcaatcgctgcccattaacgctattttttaattccaggttaagaggttctcatgcatattacatacgatcttccggttgctattgaagatatcctcgaagcgaaaaaaagattggcaggtaaaatatataaaacggggatgccgcgctcaaattatttcagtgaacgatgcaaaggcgaaatcttccttaagtttgaaaatatgcagcgcaccggttcttttaaaattcgcggcgcgtttaataaactcagctcgctgaccgatgccgaaaagcgcaaaggcgtggtggcgtgttccgccggtaaccatgcgcagggcgtttcgctctcctgcgctatgctcggtattgacggcaaagtggtgatgccgaaaggcgcgccaaaatcgaaagttgccgccacctgcgactattcggcggaagtggtgctacatggcgataactttaacgacaccatcgccaaagtcagcgaaattgtcgaaatggaagggcggatatttattccaccatacgacgatccgaaagtgatagccggccaggggactattggtctcgagatcatggaggatttatatgatgtcgataacgttattgtgccgattggcggcggcggtttaattgccggcatcgcggtggcaattaaatcgatcaacccgaccattcgtattattggcgtacagtcggaaaacgttcacggcatggccgcctcgtattacgccggagaaattaccaatcatcgcactaatgccacccttgctgacggttgcgacgtttctcgtccgggaaatattacctatcagatcgtgcgtgaattagtcgacgatattgtgctggtcagcgaagacgaaattcgcaacagtatggtcgcacttattcaacgcaataaagtcattaccgaaggggccggggcgttagcctgtgccgcattattaagcggtaagctggatagctatattcagaaccgaaaaaccgtcagcattatttccggcggcaatatcgacctgtctcgcgtatcgcaaattactggtttagttgacgcttaatctttttgatgaggataggatatgagtactacagatagcattgtatccagccagacaaaagagtcgtcctggcgcaaatcggacaccacctggaccctgggcttattcggcactgccattggcgccggggtattattcttcccgatccgcgccggcttcggcggcctgatccccatcttactgatgttagtgctggcctacccgatcgccttctattgccaccgggcgctggcgcgactgtgcctttccggctcaaatccttccggcaacatcaccgaaacggtagaggagcactttggtaaaactggtggggtagtgattaccttcctttatttctttgcgatttgtccgctgctgtggatttacggcgtgacaatcactaatacctttatgaccttctgggaaaaccagctgcagttgccggcgctgaaccgcggttttgtcgcgctgttcctgctgctgctaatggcgttcgtcatctggttcggtaaagacctgatggtgaaagtgatgagctatctggtatggccatttatcgccagcctggtgctgatttcgctgtcgctgatcccttactggaactccgcggtcatcgatcaagtgaatttaagcgagatttcgctaaccggtcacgatggcattctggtgaccgtctggctgggtatttcgattatggtgttctcgtttaacttctcgcctattgtctcttcattcgtggtttccaagcgcgaagagtatgaaaaagagtttggtcgcgagttcaccgagcgcaaatgttcacagattatctctcgcgccagcatgctgatggtggccgtggtaatgttctttgccttcagctgcctgtttacgctgtcgccgcagaatatggccgatgccaaggcgcagaatatcccggtgctctcgtacctggcgaaccacttcgcctcgctgtccggcaccaaatccacctttgccacggtgcttgaatatggcgcatcaatcatcgcgctggtggcgattttcaaatccttcttcggtcactacctcggcacgctggaaggcctgaacggtctggtgctgaagtttggctacaaaggcgataaaacccgcgtttccagcggcaagctcaacaccatcagcatgatctttatcatgggctcaacgtggattgtcgcctacgccaacccgaacattctcgacctgattgaagcgatgggcgcgccgattattgcctcactgctgtgcctgctgccgatgtacgccatccgtaaagcgccatcgttggcgaaatatcgcggccgcctggacaacgtcttcgtcacggtaatcggtgtgctgaccattctgaacatcgtttacaaactgttttaattaagctcaggacgagcggagtgatgacatgaatgaatatccggtagtactggtcattaactgcggctcgtcttcaattaaattttcagtacttgatgccgccagctgtgaagtattaatggctggtattgcagatggcattaattctgaaaatgcgttcctgtcaataaatgggggagagccggctaagctggctcaccgcagctatgagggcgcattgaaggcgatcgcatttgaattagaaaaacgcgatttagttgatagtgtggcgttaattggccaccgtatcgcgcacggcggcagcatatttaccgaatcggcgatcattaccgatgacgttatcgacaatattcgccaggtgtcgccgctggcgccgctacataattacgccaatctcagcggtattgaatcagcgcagcagttattccccggcgtactgcaggtggcggtgtttgataccagctttcatcagacgctggcgccagaggcatttctttacggcctgccgtgggactattaccagcgcttgggcgtgcgtcgctatggtttccacggcacctcgcaccgttatgtggctcagcgcgcgctggcgctgcttgatttacccgagcaggatagcgggctggtcattgctcatcttggcaacggcgcgtcgatttgcgcggtacgcaacggccacagcgtggacacctcgatgggcatgacgccgttggaaggcctgatgatgggcacccgcagcggggatgtcgattttggcgcgatggcgtggattgccagcgaaactaaccagacgctcagcgatctggagcgcgtggtgaataaggagtccggcctgctggggatatccggattgtcatccgacctgcgggtgctggaaaaagcctggcatgaggggcatgaacgcgcgcggttggcgattaaaacctttgtgcatcgtatcgcccgccacattgccggccatgccgcctcgctacgccgccttgacgcgattatttttaccggcggcatcggcgaaaattcggtattaatccgccaactggtgattgagcatttagcggtatttggcgtcagcctgaacgatgcgttaaataaacaacccaactccgccggcgaacgcattatctcttcccgcgagtctcgagtgatatctgcagtcatacccaccaatgaagagaagatgattgcgctcgatgctattcatttaggcaaaattaatgcatccctggaatttgcttaattacgttgtggtcctgtagagagattatttttcatgaaggtaaatatcgataccagcgatatgctgtacgccgaagcatggcacggatttaacggtacggactggaaagaagaaattaatgtccgtgactttattcagcacaactatacgccatataccggggatgaatcgttcctcgcacaggcgacgccggcgacgaccgcgctgtgggaaaaagtgatggccggcattcgcgtagagaacgccacccacgcgccggttgattttgataccaatatcgccaccaccattaccgctcacgatgccggctatatcgaccaggcgctggagaaaattgtcggtctgcaaacggaaaaaccgctcaagcgcgcgctacatccgtttggcggcattaacatgattaaaagctcgtttgatgcctatggccgggaaatggatagccagtttgaatatctgtttagcgagctgcgtaaaacccacaatcagggggtatttgacgcctattcgcccgatatgctgcgctgccgtaaatccggcgtgttgactggcctgccggacggctatggccgcgggcgtattattggcgattaccgccgggtggcgctatacggcatccgctatctggtgcgggaacgtgagctgcagtttgccgatctgcaggcaacgctcgagcgcgggcaggatctggaagccactattcgtctgcgtgaagagctggcggagcaccgccgcgcgctgctgcaaatgcaggagatggcggcgaaatatggctgtgatatctcccgcccggcgcgcaacgcccaggaagcggtacagtggttgtacttcgcctatctggcggcggtgaaatcgcaaaacggcggcgcgatgtcgctggggcgcaccgcctctttcctcgatatctatatcgagcgcgacttccacgccgggatcctcaatgaacaacaggcccaggagctgatcgaccacttcattatgaagatccgcatggtgcgtttcctgcgtacgccggaattcgacacgctgttctccggcgatcctatctgggcaaccgaagtgattggcgggatggggctggatggccgcacgctggtgactaaaaactctttccgctatctgcatacgctgcacaccatgggcccggcgccggagcctaaccttaccgtattgtggtctgaagcgctgccgattgcctttaagaaatacgccgcccaggtctcgatcgtcacttcctcgctacagtatgaaaacgatgacctgatgcgcgccgatttcaacagtgatgattacgccattgcctgctgcgtcagcccgatggtcatcggcaaacagatgcagttcttcggcgcgcgcgccaacctcgccaaaacgctgctgtacgcaatcaatggcggggtggatgagaaactcaaaatccaggtcgggccgaaaaccgcaccgctgatggacgacgtgctggattacgacaaagtgatggccagcctcgatcattttatggattggctggcggtgcagtacatcagcgcgctgaacatcattcattacatgcatgataaatatagttatgaagcctcgctgatggcgctgcacgaccgcgatgtataccgaaccatggcctgcgggattgccggtctgtcggtggcggcggattcgctttcggctattaagcacgcgaaggtgaaacccatccgtgacgacagcggcctggcgatcgattttgagattgaaggcgattatccgcagtacggcaataacgatcggcgcgttgatagtatcgcctgcgatctcgttgaacgtttcatgaagaaaattaaggtgttgccgacctaccgtaacgcggtgccgacgcagtcgattctgacgattacctcaaacgtggtgtacggtcagaaaactggtaataccccggatggccgccgcgccggtacgccgtttgcgccgggggcaaatccgatgcatggccgcgatcgtaaaggggcggtcgcttcgttgacttccgtggctaagttgccgttcgcctacgcgaaggacgggatctcttataccttctcgattgtcccggcggcgttaggcaaagaggcgagcgtccggcaaaccaacctcgtcggtctgcttgatggctacttccaccacgaagagcggatcgagggcggtcagcatctgaacgtcaacgtgatgaaccgcgagatgctgctggatgccatagctcatccggaaaattatccgaatctgaccatccgcgtctctggctatgcggtccgctttaatgcgctgacccatgaacagcagcaggatgtcatttcgcgaaccttcacccaggcgctgtaacgcacggggcgacgatcatggtcgccccatttttttcgtggctatgaaacctggtcttcactacacggtaaaccgaggtgtgaatatgattagcgctttcgatattttcaaaattggtattggcccttcgagctcccatacggtggggccgatgaatgcaggaaaaagttttatcaccgagctggcgacccgcggcaacctgacgcagactacgcgcattgtcgtcgatctgtacggttcgctatcgctgaccggcaaaggacacgcgaccgatgtcgccatcatcatggggctggccggaaatagtccgcaggatgtcgatattgacgccatcccggcatttattcagcgggtgacagagagcggccgtctgccggtggcgaaggggagccgacaggtcgatttcccgctgccggagagcatcgtatttcatgatagcgcgctggcacgccatgagaacggtatgcgcatcagcgcctgggatcatcagcagccgctactcagtaaaacctattactcaattggcggcgggtttatcgttgaggaggcatgttttggccagactcacgatgttgcaacgccggtcccctttgatttccgctccgcccatcaactgcttcagctttgcgagcacaatggcctttcgatttccggtctgatgatgcaaaacgagctggcgctgcgcgataagggacaaatcgaggccggtttcgccgctatttacgcggtgatgcataacggtattgagcggggaatgaataccgagggcgtactgccggggccgctcaacgtaccgcgcagagcggctgcgctgcgccgacagctggtggccagcgacagcctttcccgcgacccgatgaacgttatcgactggatcaatatgttcgcgctggcggtgagcgaagagaacgccgccggcggccgggtcgtcactgcgccgaccaatggcgcttgcgggattattccggcggttctggcctattacgacaagtttcgccgcccggtcaatgccaactcgattgcccgctatctgctggctgcggcggctatcggttcactgtataagatgaatgcctctatatctggcgcagaagttggctgtcagggcgaaattggcgtggcctgctctatggcggcggcagggctgacagaactgcttggcggcagcccggcgcaggtatgcaacgccgcggaaattgcgatggaacataacctcggtctgacctgcgatccggtggccggacaggtgcaaattccctgcatcgaacgcaatgccatcaatgcggtgaaggcggtaaacgccgcgcggatggcgctccgtcgtaccagcgagccgcgggtctgtctcgacaaggttattgagacgatgtatgaaaccggcaaagatatgaacgataaatatcgcgaaacctcgcgcggcgggctggcgataaaagtgatttgcgcctgacgaatcagaaagggctgggctggcgcgccgctatcgcttcaccgctgatcggatggtgaaaatgcagttcgctggcgtggagcatcaggcgtgaggcctgatgtgccgccagctctccgtagagatcgcagccaagaatcggataaccgagatgctggcagtggatgcgtagctgatgggtgcgtccggtttccggcagcagccgtacgcgcgttaccgccagcgaaccactggttatcggcaaccattcccgtgatagtacctgatagcgcgaacgcgccgctttaccattacgcgcgctaatcgccatgcgcggaaacagcgccggatccttggcaatcggcgcgtctataatcccttcatcttcctctggatgcccgcacaacagggcgtgatagaccttgcataccgcccgctggctgaactgctgacacagcgcggcgttgatcgttttgttacgcgcgaccaccatcagcccggacgtcccgaaatcgagtcgatgcaccagcgtgcatcccggaaaatcccgcaccaggcgatgatgaactgaatcctggttctgcgggttcttacccgacaggctgagcaggccgctgggtttgtcgatcaacaacaaatgcgcgtcctcgtagaggatcttaatctgcgcggaacaaggtggggcgataaaggtatcaatgacggtggacatgggcaggcgctgcttaagggtgatgggggatgatagcgaaattacgggctacaggcgaatgaatttgatggctgtcaaaggagagtgaatcagctaacaattcggattgtgctaatgaacgttattagatattcaacttgctgcgttaatatttcgcggcgaatgaaaaggattattcatggaattgctaattaagaaaggtatttattcttgtgttaaatggttaatgttattaattagccttactgcagggttatccgctgcggcaagcgaaaatatgccggataatttttatcgcgtcacccctgagttgtatcgttcggcgcaacccaatcacctgcagatgcagagcctggatcgcattgggatacgctcggtgttgaatttgcgccagtggcacagcgatgcagacgaagcgaagggcacggggcttattctgtatcgggtgccgatgaacgcggccgcgattaacaacgatgatgtggtgattgcgctgagttttttacatcgtgcggcaaaaccggcgctggtgcactgctggcacggcagcgatcgtaccgggatgattgtcgcgctttaccaactgctgtttagccacgcaacaaagtcagaagtgttgtcagagctgcgccgcccggaatatggttaccatcagcaattttatcctgacattgcccgatatattgcggcgattaatgtagaagaactgcgtgcgagggtgctgagtttatccgcaggaaaattataacagctaccaataggcgatactgcggaaaaataaccaggcggaaaaaccgaccatcaccgtaccaacaacaatataaaaaaatatattgacgtaaaaaccaaaatcaccgcggtaataataatcttttatcggtgatgatttccgcgtttcgataatcacgcctttctgatagccccgtatcccgtgcagtaacatccagatggcggtaaccagcattaaacaagcaataatagctgcagtgtaatccatacgttccttttatgaatttgctgaatatttaaattgtcattattttaatgtgggtatattacccgaagcgattgtaaaaaatctacgtctgtagaattgcagtcggtcggggaacatggtacaacaaatgttatgttataacattcaatttaatgattatgaaccaacctatacctgaactcctgcatgttgacggggtcagtcttctcgcccggagtggtacgacgatacttaatgatatccagttcgcgctccgcgctggcgagaagctggtggtcattggtcccaacggtagtggtaaatcaagcctgctgcggacgatcattggcgacgctcgaccggataaaggaacgctgtactggcagggggggccactacggcatctgtcgccacaagcgcgcgcgcggaatattgccttcctgtcgcaaaacgatatccccgatttacgcctgacggtggaagagtatgttcaattgggccgtttaccgtatcgcgaatcaccgtcctcggcgcagggacagcgcatcgtggatagcgttattagtgatacgggtctgcagcctttacgccatcgcccgctgggcaacctctccggtggtcagcgtcagcgcgccgcgcttgcccgcgcgctggcgcaatcccccgaattgctattgctggatgagccgaccaatcacctcgatccgctggcgagaagcgagttgcttaccctggtaaagcgcacagaggtggcggtgattgcggtgttacacgatcttgccgcggctgaagcctttgccgaccgaatgctggttatccaccacggcaagcaggtgatttgcgacgtacccgaggctgcgctgcaccccagcgtaagctatccggtttttggcatggccagttttcgcgtggcgcatcccgtgagcggtaaagcgctgcgcatttttgaagttcctcatcgcgcttaatgacctcgagtaaatatgaatagacttttaactattttatggctgctgttaagtagcccgttcgcgttagcgaatccatttcccgttaccgtggacagctgcggtaaacccatcacctttaatcaacccccacagcgtgcggtaattaacgatcttaatatggcggaaatggcctttgcgctcgatctccaggatcggattgtggggctaaccggcatcaccggctggtataaactaacaccacagttcaaagcagcgatgggggccatccccgagttagcgcctaaatacccgtcgctggaaacgctgctggcggtccggccagactttttcttcgccggctggaactacggcatgaaaattggcggcgatgtgacgccgcagacgctggcgccatatggaattaacacgctggtattgagtgaaagttgcgtacaggccggcgggcaggcaaagaaagccgacatgagtttgctttacaacgatgaactcaagttgggtaagatttttggcaagcaacaacaggccgaggcgttggtggaagggtggaaacgtcggctggcgaacctgcctgtcaggccagcgaatacgccgccgcagcgggtctttgtctatgactccggcgaggataaaccctttaccagcggcaagtacgggatgccgacggccattatcgaggcggccgggggacgcaacgtgatggatactctggacgcgaactggaccacgacgagctgggaggcggtggcggccagcgaaccacaggtgattattctgctcgattaccaaaccggcacgggaaccgcggcgctgcagcgtgtactcgaatctcatcccctgatgaaacagacgcccgccgtccggcagcagcgttatcttaagctacagtatgctgaattgactccgggtccggcgaatattgcggcggttgagaagctggcgcacctcttatatgccacggacgtgaaatgaggccgtcaatgcaacgttttgttctatggactgcgctggcatccgtcgttttatgcggcatgatgatagcgagtctgcagtggggaagtgtggaactctcgtggcgacaggtgctatccgcgttgggcctggcatccgctcccgttgccgaaatagtgaaaactatcgtcattgacttacgcctaccgcgagtcctgctggcggcgctaaccggcgcggggctggcgatcgtcggcttgctcttacagaccacgacacgcaacgaactggccgatccgtttttgtttggcctgtcttcaggcgcttccgctggcgcggtgctggtgatcacccgcttcggcgatgtactggggccactcacgctgccgggctcggctttcgtcggcgggatattatccgcgctggcggtgatgatattgtttcgcgtcaaccagctaaggcgagcggaacagttaatcatctgtggcctggcggtgtcgtttcttttcagcgcgttgaccagctatctggtcttttccggcgaccagcgggcggctggttcgttgctattctggtcattgggcggtctgggactggcgcgatgggacaacttgttcattccgttattgagcctggcgttgttaagcggatttaccctgcgccgctggcgggcgctggatgcgctgttggcgggggagcagacggcctgctcgctgggcgtcgaggttgagcggttgagaagcgaaaccttcctctgctgcgcgttggctaccgctttgctggtttctataaccggggttattggtttcgtcggcctgatggtgccttatctggcgcgtcgggccgttggcgtcaggcatcgaatggccgtgccgatgtgcggtttgcttggcgcgatattgctcactggaggcgatatactcagccgaagcctgatagcgaatcaagaattaccgattggtattatcactgccgggcttggcggcgcgtttattgtcggtttgctgatgcgggcaacaggataagccgagtcaagggaaaaaaagagattgacccattattgcgcgtaaataatgggttctattatttaaatgaatattacttgccggtaataaaatcattctccactgtagaagggagatttctcctgctagtgcgctttcagacgaggtagagtgtttgtaaataattcgccaaaaatataattgtggcaaaaagcctttcaggccaatattgctgcggcctggcgataagtgatgatttatatcaatggaataggcatcattggcgcatgccccgtccgttagtaagtttcaggtttaatttactgcgaaaagcacctattgcaacgcaatatattgtcatattgcaattgtcagttgctttgttttttattctctcggtgaatattcttgatatcaatctaaatatagttcattaatctgggtggttaactaaaaccagcgattcattctgaaacagttcggatatataaggaatgtaatgaacgacgcctttccgggtgagcgactcagtgcccgtattcattcacaattggcactgcataacgaaattgaacagagggttgtcgagctgttgcttaaatccctgagcgtgagtcgtttcagtaatattaaaacccatccgctaatcattcaagaaaaaataaatatcaataataataattcaacttttctctttcgaaataccgttcgccaatcagttagcgtggtgaaattaaatatcggattgatgaacgccttattgaagaagcaagagtaacgcacaggaggtgcgatgaagacattacgaccactgtggggcaggggccaaatgatctccccacaacattttcaacaacaggtgaatcaggcggcctggcaaagcgaatgtatcgcccgtctgggcgtgatgaatccctgggggattatccgcgtcgaatttgacgccgcattgctaaaacaggggaagctgaaggccagccacctctatatacgctttcctgatggaacgcttatcgacagcgataatgctgatgcgctgcctgaggtcatggtgttgccgcaagcggaaagccgcgaattaacggtggtgctggcgctgcctcatgagcatgaaaacggcggcaactgcctgcagatggaacaacgcgcagagcggccggtacgttggcgtttggcctggcgagaagtacgcaacagatacggcgaagacagtcgacaaattgcggtgatgcttgcgcaactgacgctgcgcacagcggatgacaataacggcgattatcaaaccgtcgccgtcgccagattacgtcgcgacagtcaggattgctggtcgttggatgaggactttatcccgccgctgctgaaagtgttggccagccgctggctgcacgaacaaacggaacagctgacgaatcaactgggtgtgcgcctgcaacgcctgatggccatgcgtagggaaagcaacgccaggatggcggattttgcggtagcggatgtatcgctgttttggctgctgaacgcgcttaacagcgcggagccggtgttgaaccatttcctgcgccatccgcaggtacatccggaacggctgtatgaagcgctggccagcctggcgggcagcctgttgaccttctcccttgaccataccacggcggatattccgccctatcgccatcaggcgttgacggaagtctttccaccgctgttcaaattactcggcgtactgctcgaagccagcctgccatcccgggttgtggcgattgaaatgacgcacgatgaccggcgtaagcgctggcatgcccgtctgcacgatccaaggttgcgcgaagaggccgatttttatctctcggtgcgttccgcgctacctgcggcgcaactgctggagcagttaccgcaacagtgtaaagccggtagccccgatgaggttgaccgggtggtcaacggttcgcagcccggcattccgctgaaagccatgagtcatgttcccgccgccatcccgctgcgcctggagaatcagtatttcacccttgatatgactcatccggctgcgcaggcgatgctggcggaagggagttgcgtcttttacgtgcccggcctgctgggcgaccctgaactcgaactctatgcggtgctgcgctcatgacccaggatatcaatattgatgctctgctggcggatagctggctaacggtgacggaactgcgccttggcgccaaactggccgagggggaggggaaacatctctggcagcgttgtgtagacaacattgaacaggtgatggcgcagctggtgaccgctgatatcagcgaggcgaaccgtcagcatatcctctatgcgtggtgtgcgctgctggatgaaaccgcgaaagggcgcaatgaggaagatgacgcctgtatcgcctggtacgatcggccgcttgaggttaaatattttggcggcatggaagccggagatgcgctctatgagcgcatccgccaggtgctgcgcgagccggcgccggataatctcgttttgacttgtttccatcgggtgctggcgctggggtttaaggggcggtatggcctcaatgatccggcgcgcgcagcgctcgtcagcgcgcttggcgagcgtgtaccgccgtttgcgggcgatcctcagcagccgattctggcgaatctatccggccgccgcggtctggcagactggttgcgtcgttggccggtcagtattggcgtgtcgctggtgctggtggccgcgttatggttggggttgaactactggctggatgccctggtggcggcgttgcgactgggaggcggacaatgagcgcgcgctatcagcgcctgctctggctgtggggcggtctgctggcggtgttgatgatcctgctgtttctgccgttatccaccggtggccgggtgctggctgttgggttgacggcggcgggcgtagcggccgggctggtctacgtcgggcgccaacaacgtgagcggcctgcggatgccgactggctggttgagctaccgtcggcgccgtatcgactgccgattgtgctggtctgcggcgacacggcggactggccgggagaaagcgcggtttatcgtacggctcagggttgctggctgagactcgccaccgccgcgttgcagcagacggtgcgttatgtgcgcaatgagcgcccggcgctcatcgcgcaactggcggtgatgttctgcatgcagccgcaacaacatgatgatgacgcggcgctggcggcgcggctacgcgagttgcgctggcagcttgcccaggtgcggggcgatacccgtcgggcgataccgttactgctgaacagctctctatccggcgcatcgctggaaccgttatggcagacagcgcgtgccggagagacgttgcaggtgtggctgcctgacggcgtgccgtgcagcagcgcaagctggttgatgcaggctgatggcgctcatcgcctggcggcgcagctaaggataaatgcgcttgcccgctttacgcagcagatggcgttaagcgtactgacggcggccaccgacgatgttcccccgatcgctccggcggtcgtactgtatcatttcacgccagccggggcgcctgccatggcggataatctatggcagcgttggctgtctgagcatacttccctcaactcactaccgggctggttaccggaaattgctgcagaagcgcggaaactgccggatttcattttaccgatactggcgcagggcggcggcatcacgccgaaaagccgtgctctgcggcgggcattctgtctgttctccctcgcggccctgattgcgctgtgctgcagcgcatggaacaaccagcaactcctccagcgggttggttttgatgttcagcgctatgaacggacggcgatggacgaccatgccgcaaaagcccgcgccgtacagattttgcgtcaggatgcggcgcaactggacgccttcgcgcgtgatggcgcgccgctggcgctgggccttgggctctatcgcggcgagcgtctgcgtcagccggtactggcagcaattcgttcctacgtccctccgcctccgccgccgaaagcggtagaaaaaatcgtaccgaaaattgtccgtctcgacagcatgtcgctattcgacaccggcaagtggacgcttaaaccggggtccaccaagctgctggtgaactcgctggtggggatcaaagccaggcccggttggctaatcgtcatcgccggacataccgacagcgtaggcgatgataaatccaaccagacactctccctgaagcgtgccgaatcggtgcgtaactggatgcgcgataccggcgacgtgccggaaagctgttttgcggtgcagggttatggcgaaagccgtccggttgccagcaacgatgcgcagcaaggccgggcgctgaaccgccgggtcgaaattagcctggtgccgcaggccgacgcctgtcaggtttcgacgaactccgcttcaactccggcggatggcgctttctaaaccgaccatctcatgactcttcgtacggacaggttttcctgtccgtcgtttttgttgccgggtaccggggtcaacacaatctgcccaaccttgtgcgcttttgggctccttatcaacaggaaacagcgacgggcggtagcgtggccgaaggcgacggaagggagataaagagcatggcgtttgatacaggaaaataaatcatgagtgacataaagcctctgttgttcaaccacagccatcatctgttacaggtgcatggttgtaactcgttgctggacgttctgtgctttgaaggcgaggaaaacttaagcgagcctttccgctataccattgaatttaccagcagcgataaagctatcaccccgcagcagatgttgctgcaaaatgcctcgctgaccttgcaggcgccggttgaccagggatttggcattaagatccagcaaccggtgcgcgttcttcagggagtgatcaccgcttttgaacggctttccaccgcaaaagaggaaacgcgctacgccttgacgttacagccgcgtctggcgctactgtcgaagagccatcagaaccggatttatcaggatatgtcggcgccgcagattgtggagcacattctcagaacccgtcaccagatgcgcggggaagattttgtctttcaactggcgcatgaatacccgcagcgtgaacaggtgatgcagtacggcgaggacgatctgacctttatctcccgcctgttgggtgaagtggggatctggtttcgctttaccgccgatacccggctgaatattgatgtggcggagttctacgatgaccagcaacactacgagatgggactgtcgttgccttcggtcgctccctccgggcagcatgacggtgggagcgaatcggtgtgggacttacagagccgataccacgtggttgagcgttcggtctttactcgtgactataactaccgtaacgcgccagaggatatgaatctcaacgtcaatgtcagccgcggcgatagcaccacctatggtgaagcctatcactgggcggacaactatctgacgccgggtaatcgcttccagcatactccggacccggagagcggggccttttatgcccgtattcgtcatgagcgttatctcaaccagcagacgcggctgaatggggaaaccaactgcgcggcgctggctcccggccagctgctaaaagtgagcggcggcgaagaggtgacggacgtctggcgccagggggtggcgatcgctgctattcactgtcgcgcccgtcgcgatcgcagcttcgtcatgacgtttcaggctattccctgcgtagagacttactgctttcgcccggcggtcatcagcaaacccagaatggccgggacgctgccggcgcgcgtcaccagcaccaaaatcaacgatctctatggccatatcgatcgcgacggacgttatcgggtgaacttattgttcgatcgcgatcgctggcagccgggtgaggaaagcctgtgggtgcgccaggcgcgcccttacgccggtgaaacctttggtctgcatctgccgttgttagcgggcaccgaagtggcgatcgcttttgagcagggggatcccgataggccctatattgccggcgcgctgcacgactccacgcaccaggaccacgtgacgctctacaactacaagcgtaacgtgctgcgcacgccggcgaacaacaagattcgcctcgatgatacacggggtaaagagcacgttaaggtcagcaccgaatatggcggcaagagccagctcaacctcggccacctggtggatcatcagaacacgccacgcggtgagggatttgagttacgcaccgacagctacggcgcgatccgcggcgggaagggaatatttattaccgccgatgaacagctgaaagcgatgggcgcgaccgtggaaatggatcccgcgaatcaattgctcggcagtgccgttgttcagctcaacgactggcaggagatagcccgcacccactacaacaccccgccggatgtcagcacgttaaagcaattcgtcggcaaagccgtcaacctggcgagccccgtcctgctgatgagcgcgccgaaaggcatcggcatcgtgacggcggaaacgacgctgctacagagtggtaaagggttgtacctgcaaagcgccagcgatattgcgctggccagcggcaaccggctgtcggtgaataccaaaaacgcaatctcgctgctttcccaccgcgaagggatgcgtatggtatcggtgaaaggaccgctggagatagagtcgcacggcgacacgctggcgctcacttcactgaaggatattaccgtgcagtcaacgcagggacatctgcagcttaccgccaaaaatggcatcaccctgggctgtggcggcggctacattcgcctgacgccgcagggagaaatccatcttcacagcccgagtctgctcagttttaaaggctcgcataagatgcaggggccggccggcgagacgtttccgctccccgatcttcccacatcgatatgtaaagactgcctgattcgtgcgcaagaactggctcaggcttttgtgccacgtgccgcctgacaatcgctcattgatataacttacccggaggaacagaccttgaaacccattattcggcagggtgataccttgcgtgagcatggcggtacggtgatcggcggccattatctctgttttggtaaaggcatcgcctgcaaaggcgaccaggtgagctgcaatgaacatggcctgacggtcatagccgaaggaagctcgctgtatgaagtggatggttctccggtggctcttgacgggcatcattgcgcctgcggctgtacgctggtgagttcacgccctgattgcgaagtcgcgctatgagacagctaaccgactatctgccttacaaaaccgccacgccgccccacaacggacggtggttgtccgtcggcgcggggatgacgcttatcagcggaggaggcgcggcgttaatgcctgccgaagcgcgtggcggggcgttaataaccgtcgcaatcgttagcgccatgcttttggtcctcatcatctggatgctgcgtctgctttattaccgcctgtcggttcactacacccagtactaccagcggttgatcgatttcgatcatcaaacgtggtgggcccggcatcaatatagcgttgggctggtggaaacggtgctgctggggccggtgggatgtgaacccgagcgctggcagacgctgctgaagcgagaacatcagccgccaaaagagaaactggagtccggtgcgcgggcgctgcgactgatccactcggacatcgtggatatcgacctgcgtgaacagcagctagcccgaatgctggcgcaacaatggctggcgcaacgcggcgaacatcaacttcccggcctgagcggctgttactggcagggcagcgaaccggcgtggcgagaattttgcgccgagctgcgcaagcgctgtcccaccgctcagttgccgcatatggcggaaccctggcagggcgaggccagcttatcggagattaccgcgcgaattaatgaggccgatgacgaatgtttcattctggtggcggggtgccagtcggtggcggcgacggcggattcggcgagaccggcgggggaatcagccgcgctctggttactggcccgggagggggaggcgcggctgacccgcggcgaggtttatgaaggcgccgcggtggaaaatatccagcaggtctgtcagcgggcaatgcagcaaagcggggctgaacgtcctcccgatccctgtatcgcattcactcaaccgcaaatcccggaactggcgcaaagcggctggaacagcaaccaactgctgcaggatgaaaactggggtgagacggggcagatggagccgctcatcaccatcgcgctggcggcgatttttgcccgccgttttcaacagtcttgcggctggatcgcccgcgatccgcgtcaccctctctcactaggcatcgtcaccgcagcactcccggcaccgcaacctcaagacaagaaggaatgaacatgtcgttaatgaatcaggaatggattagcaagctggaacaatttgcccgaaagctcgcgctgcgcgacgtctatctcattgccgatcaaggcgttttagacaacccgttattggatggcttaaatagactttctcctccggtgcagtggttctcactctatcaggggcaaccggaagagccgctgctggagatggcgcctttattgatgcggctggagccagcctgctggcagcatcgtcagaggatcgccgatctgatcgccgcattttcctgcaagccgggtctgctgatcttcctctcaccgctgagtttttcaacgctcgccgcccacctgcgcaacctggccgacggcgcatgggaagaccgttctggcctggtgcgttattacgacacccgtatgttcccgttgctgatgcagcatgtgctcactgaagagcaaaaagcatggtttttagaaccggtttatctctggagctatcgcgatagagacaacaagatctgctggctggaaggcgagtgctcgcctgttcaggcaacgatcccggaggcgatcaagattaatttcagcgatgagcaaatgatgaaactggatgtcgctatcgatgcccagcaatttacggtttctgaaaaattcagcaccttttttaccacccaggaggagaaatttaacactctttggcagctcggctggcaggcgcatcagcagaattttagcggtgatttagcttcctggtttgaaagccactttgaggaatgaaacatcctccttgttgatcatcaataggtgattatcagttctgtaaggacacatcaatgataaagcatatccgtattttgcccggcgggctggcggtgctggccgccgcttttctctgcctgctgacggcctgtcgcgaccacagtcgcgacggcatgagcggcgctgacataacgttgttaaaccatggtccggacgccatcgtttcggtgcaggtgaacggctacggcgggccaggcgctaactcctacggcggcggcttctgctgcgtgatggtgccagatgtctggcgcccggggctgacggcaaaaattacctggacctccgatcctaacgcctggatgaaatccagtaatatgcctgacaactattcgcaatactatcagcgccatgggccaattaccgtccccattgaacgctgggagaaggggcaggcctgcggttttgacgtgcatattttcccctgcgataaggtgcggatagtccgttcctgtattccgccgggacagccggggtatccggtgccaccttcccctccggactggaagcaaagagcacaaaatatcattatgaaaaatattaaggaggaagttgtatgtccgacaccgcagactccacgctgaatgccctgaaggcgcttattgcggccttccagaccggcgccactccggtcacggttaaagcctccaccgcggaagcggccagcttaccgccaaagtttcccgggccggatgatgaaaaggagaaaacgcccgcggataactccacgcagcagaaaaccgaatacaacaagcgcggccgtctgccggcgagcagaacgcagaccgaaggaaactatgcctcttagcatacacaattcgccgctgactaatattgcccggctctaacctctggaaaaccggtattaatgtctgtagcgaccaattttatttgaccgctacaaatatcattaccagttatatatgggggttcatctattagcataaatacaagcatttaatgacgtcatttattaataagtcatcactttaaatttgtaaggacacatcaatgataaagcatatccgtattttgcccggcgggctggcggtgctggccgccgcttttctctgcctgctgacggcctgccgcgaccacagtcgtgacggcatgagcggcgccgatttaaacctctacaatcacggtccggatgccatcgtttcggtgcaggtgaatggctacggcgggccaggcgctaactcctacggcggcggcggcggcttctgctgtgtgatggtgcctgatgtctggcgcccggggctgacggcaaaaattacctggacctccgatcccaattactggatgaaatccagtgagatgccggatgattatgaaactcactatcagcgccatgggccgattattgtacctattgaacgttgggaaaagggacaggcttgcggctttgacgtgcatattttcccctgcgataaggtgcggatagtgcgttcctgcatcccgccgggacagccgggatatccggtaccccagtcgccgccagactggaaggaaagagccaaaaatatactttataaacatatcaaggaggagatcgtatgtccgataacgcagactccacgctgaatgccctcaaggcgctcattgccgcctttcagaccggcgccactccggttacggttaaagcctccaccgcggaagccgccagtttaccgccaaagtttcccgggccggatgacaaaaagcccgcggataaatccgcgcagcagaaagccgaatacaacgagcgcggccgcctgccggcgagcagaacgcagaccgaaggtaactacgccaggcagtacctggaaggatatgtcggggagtcagaagatccctcggacaaaaaaacggaaccgggctgcccggccagcctgcatatcagcctgttcttcgacggtacctgttgtaatgaagaagatggtgatgaagtgtatggctcgcgaaacccgccgctgaccaatattgctcggctctaacctctggaaaactggtattaatgtctgtagcggccaattttatttgaccgctacaaatatcattaccagttatatatgggggttcatctattagcataaatacaagcatttaatgacgtcatttattaataagtcaccactttatatttgtaaggacacatcaatgataaagcatatccgtattttacccggcggactggcggtgctggccgccgttttgctctgcctgctgacggcctgccgcgaccacagtcgcgacggcatgagcggcgccgatttaaacctctacaatcacggtccggatgccatcgtttcggtgcaggtgaatggctacggcgggccaggcgctaactcctacggcggcggcggcggcttctgctgtgtgatggtgcctgatgtctggcgcccggggctgacggcaaaaattacctggacctccgatcccaattactggatgaaatccagtgagatgccggatgattatgaaactcactatcagcgccatgggccgattattgtacctattgaacgttgggaaaagggacaggcctgtggctttgatgtgcatattttcccctgcgataaggtgcggatagtgcgttcctgcatcccgccgggacagccgggctacccggtaccccagtcgccgccagactggaaggaaagagcaaaaaatatactttataagcatgttaaggagaacatcgtatgtccgacaccgcagagtccacgctgaatgccctgaaggcgcttattgccgcctttcagaccggcgccaccccggtcgcggtcaaaacgtccaccgcagaagcggccagcttaccgccaaagtttcccgggccggatgacaaaaagcccgcggataactccacgcagcagaaaaccgaatacaacgagcgcgggcgcctgccggcgagcagaacgcagaccgaaggcaactacgccaggcagtacctggaggggtatgttaaagagtccgatcatccctcggacaaaaaaacggagccgggctgcccggccagcctgcatatcagcctgttcttcgacggtacctgctgtaatgaagaagatggtgatgaagtgtatggctcgcgaaacccgccgctgaccaatattgctcggctctaacctctgaaaaactggtattaatgtctgtagcggcccattttatttgaccgctacaaatatcattaccagttatatatggggggcatctattagcataaataaaagcatttaattacgtcatttattaacaagtcatcactttatatttgtaaggacacatcaatgataaagcatatccgtattttacctggcgggctggcgatgctggccgtcgcttttctctgcctgctgacggcctgtcgcgaccacagtcgcgacggcatgagcggcgctgatataaacgtcttaaaccacggtccggatgccattgtctcgttgcaggtgaacggctacggcggaccaggagccaattcctacggcggcggcggcggcttctgctgtgtgatggtgcccaacgactggcggccggggctgacggcaaaaatcacctggacttccgaccctaactcctggatgaaaataagcgatatgcctgacaactattcacaatactatcagcgccatggaccgatcaccgttcccattgagcgctgggagaagggacaggcctgtggctttgaagtgcatatttttccctgcgataaggtaagaattgttcgttcttgtcacgatcgctcatctccggaatatccgatacatcgtgcgcccgatgaggatgaaaaagcgaaaaaaatattatttgaccatgttaaggagaacatcgtatgtccgacaccgcagactccacgctgaatgccctgaaggcgcttattgcggcttttcagaccggtgccactccggtcgcggtcaaaacctccaccgcagaagcggccagcctaccgccaaagtttcccgggccggatgacaaaaagcccgcggataactccacgcagcagaaaaccgaatacaacgagtgtgggcgcctgccagcgagcagaacgcagaccgaaggcaactacgccaggcaatacctggaggggtatgttaaagagtccgatcatccctcggacaaaaaaacggagccgggctgcccggccagcctgcatatcagcctgttctttgacggtacctgctgtaacgaagaagatggtgatgaagtctacggctcgcgaaacccgccgctgaccaatatcggccgtctctaccatgcagcaaactggttagataaggcggagaatgatggttacttttgttactactttcccggctgtggcgcacgctttccggagattggtgaagagcactactcgctggacggcgagctgtttgccaacggcggtgaggatcgtatcaaccaggcgctgcttaaaacctacagcagcatttgctatgcggtgagaaaggaaaggatcgaagacagcgaactggatatctttcggcctcagatggccaccgtctggcccttctcgcggctgacccagaagttcaaccgtaaaagcgcgcttgacaaattctgcgacgaccatctggggtgcgtggtcaaccagtggccgcggcagccaacgcggttgcatatccagcgctcgcagcggcgcatcgccaaaatcaagctctttgtctacggctactgccggggggccgccaccgcccgcgccttcgcccgcggactggagtcgctgctcgatgacgctaaaatgccgcttgatgcgacaaatatgctgccggcgggcaccgtagtatccggcggcccgaccctgctgggcattcccatcagtatcgagtttatggggctgctggatacggtctctgcggttggcgtgccgcatatcctgccgtcggccaccgggcatctgggctgggcggccaacagcctgcggctaccgaccaccaaaggtttcttaaaaagctgctaccactttgtcgccggccacgagcagcacggcgacctgccgctggactctatccgcggtccggacgggaaatacccggcgggagcggtggaggtggtctatcccgggatgcatgccgatgttggcggcgactgtaaacccaccgaactcggtaaggtgcagaccgactcccgcagcctgctgtcaaagattgtgctgcatgatatgtatgccgccgccttcgatgccggggcgccgctgagcgtacctgaagaagtattgcccggtggggctcaggacaaaaaatatcgtgttatgcaaggctacgttgctgattatttcaaaatctccgcccaggccatcgccctgtttaacgcctggcagcaggccggggcgcagcaggcgggggcgaagagcgaaacgccggccatcaacgaagcagaggtggtggccatcgccgtggcccaggggcgggatccggtcgccgcgctgaaggcagctcacgacaaggcggatggcgataaggcgaaagccgccgccgccgcgaagccgccggagaacggcccgatgggcaaactgccggatccggtgtatgtgccgctgaaggccaaagcgctggaggtgatgctggcggaccagctgagctggatcaccgcctggcgcaccgagcgctttgccagcccgcaatacgccgataagtattatcagcgtaagcctttttatcagcaggcgctgaatgagtcgtccggcgcgctgccgtcggcgggggcgcccgcggaaagcaaagggccgcgtgaagtgccgtttatcgataaggatcggcttgaccgcgcggcgtggggctatgactttgcccataccggtatcgtggcgctgctggcccaggtgctgctggatgtgatccccaccacgcaaaccaaccagcttggcggtccgctggtggcggcgcaggagtcggaatatatccagatcaagaaaagcggcgatgcccggcgggcggcgctgatgggctcgccgacgatgctggatttttacgataactacgtgcatgacacgctggccaaatataatcacgacccgctgcactcctcgttttcacacggttattttgcgtcgcggacgatttacgataacgatgacgatacgtgggattcggtgaaacaatttggccagcgggtaaaagcgattatagatattaatgttggcgatatattagtgcaggcgcgaacggatatgaaagatctgaatacggtatcgggcgtgttgggtaaaatatatcgcgatataaaaagcgaggcttttaaaatactgctgccttaattcgttatcgccatattcattatatccgctaagtatccttaataacgctatacgggcgtgatgatgcacgcccgtggctaagggaatcatcaattttatgttcaaggaaaaaaatgccgcggtaatgaccgtagcggctaccgcgaccctgtgtcttgccgtctggacaattgtggtcctgctgagtggtctgggatggtggaactggcacgccaaccgcacgctgcagtggacggcgatccgcgagatagtgaccgtctgtggcctgatctgggcgtatggtctctgtctctggatactgggctttattgctttccacctgtttatcaggcaaaaagccgatgggcaacagcgtcagacgcggacttttattagccagcagacaaaaccggcgcagccgtttgcgtccttaaagcactttctccgtcgccgctacggccgattgtggcgcaataaggtccgcctgctgtgggtcgctggcgaggcggcgcagattgccgccatcgctccaggccttgcgcaacagcaatggctggagggccgcggtacggtgctaattcacggcggtagcctgttggctgaggtggataacgagcggctcagtgccctgcgtcggctgcgcggccgccggccgctggatggtatcgtgctggcgctggacaatgctcaggccaccgccgcgaccctggacgggtatttgcgaacgctggagcaggttgcgcaggttctgcgctaccagccgccggtctatctgtggcaactccacgacagcgactggctgcaggatacgcgcattacccagacgctgggggcgttgttcccgccgcgggccgtcccgcaggatgttgaacggcagcttcgcgccattctgcccgccatgctggcgcaggggacccagcagttgtgcgctgattcgtcccacgattacctgctgcgtgtcgctaaatggctgaaggagggcggtatcagcggctggaagacgctactgacgccgtggcttactgggtatctgcaacagatcccgctccgcggtctgctgttcagcccctcgttaaaggcggaagaagcggtggacaatgggctctatccccaccgttggccggccccggccgtctggcaggggatcatcgcagactgcggccgcgcgcgcggcgtgccggtgggggtggcgtggcgccgctccctcggcgtcggcctgctggcgctgtttggcttgtgggcggcgggaagcctgctctcttttatcgtcaaccgccagcaaattgtcagcgccacccagcgggtacagctgctgcggcagcccgtcgttaacgaccagcagctgatcgatttgcaggtgctgcgcaacgatatcggccgtctacagaatcagctcgccaacggcgcgccctggtatcagcgctttggtcttaatcataatgcgccgctttctgccgcgctgctgccgtggtatgggcgggctaaccagcgtctgatccgcgacgccgcggcagaagcgctcacccggcaactgacggtgttggtcaacctaccgccgcgcagcccgcagcgggcgcagctggcgaaagcgggttatgaccagttaaaggcctatctgatgatggcgcgtccggacaaagccgatgcggcgttttaccgccaggcaatgaccgccgcgcagcagacgcgtcagggagtcgccccggcgctatggcagagcatcgcccccgatttatggggcttctatatggacaacttgccatcgcagccgacgtggagaatcaccccggacgccgcgctggtgacgcaagcgcgtcaggtgctgctggcgcaaatcgggcggcgcaacgccgaaagcacgctttacgagaacatgctgctgcaggtgcgccgtaactatgccgacatgacgctggaagacatgacgccgcagaccaatgcgagccggttgtttaccacggaagaggtggtgccggggatgtttacccgtcaggcgtgggagggcggcgtgcgcgaggcgatcgataaggcggtggcgaccaggcgcgatgagatcgactgggtgctgagcgatagccgccagaccgtcagcggcgacgtctccccggaggcgttgaaacagcggctgaccgatcgttatttcaccgatttcgccggggcgtggttgggttttctcaatagcatccgcttgaatccggcgcgcaatattgccgatgtgaccgatcagctgacgttggcgggcgacgttcgtcagtcgccgctgattgcgttgatgaatacccttgcctggcaggggcagaccgggcagcagcgtgagggcgtggcggattcgctggtgaaatcggcaaaaagtctactcgataaggataagcagccgtttatcgaccagcaggccggcggcgtgcgcggcccgctggagagcacctttgggccgctgctggcgctgatgggcaaaaatccctctcagagcgtggtcgccgcagacaacaccctcagtttacagacctggctgacgcgcctgacccgcgtacgcctgcggctccagcaggtggcaaacgcccccgacccgcaggcgatgatgcagcagctggcgcagaccgtgttccagggtaaaagcgtcgacctgaccgacacccaggagtacggcagcctggtggcggccagcctcggcgaagagtggagcggtttcggccagaccatgttcgtccagccgctgacgcaggcctgggaaacggtgctgcagccatcggctgccagcctgaacgaggcgtggcagcgttctgtggtcgctaactggcattcggctttcgacggccgctatccgtttgccgcgggcaaaaacgatgtctcgctaccgatgctggcggcattcatccgtcgcgatagcgggcgaatcgaccagtttcttgcccgacagttgggcggcgtgctcaaccgggagggtagccgctgggtggccgatagcgcgcacagtcaggggctgactttcaatccggccttcctgaaggcgattaatcaactgagttccttgtccgacatcctgtttaccgacggcagtcagggaatggggtttgaactacagggggtggcgacgccggggatcgttgaaacgcaactcaccctcgacggccagaatctgcactactttaaccagcttgccgaatggaaaagtttccgctggccggggactatcaacaaacccggcgcgatgctgagctggagctcagtggcggcgggcgcccggctattggcgaacgacagcggcccgtggggcacgctgcgtatgctggagagaatgaagcgccagcagatcggcgatgggctgtttcgtctgacggtcaatacgccggataaccggcaactgcagtggctgctgcgtaccgaactcggcgatggcccgctggcgttgctgaaactgcgaaacttcacgttgccgacacagattttcatcgtggaggcctcccgtgcggaaccgtttgctgacggtgacgtagaggaataagggccgacattcacgctgcaagcgctgctttacaagcagcgagtttttcaattctgacatctgagatattccatggacgatttaactctgcgttattttgacgctgaaatgcgctatctgcgtgaggctggcgaggagtttgcccgcgcccatcccgatcgcgccgcggcgttaaacctcgataaagccggcgcccgtgatccctatgttgagcgcctgttcgaaggctttgctttcctgatggggcggctgcgcgaaaagctcgacgacgacctgccggagctgaccggcgggctggtgagtatgatctggccgcattatctccgtaccattccgtcgctggcgatggtggagttcagcgtcgactggcgggagatgaaagagccgcagcggctgaagaagggaacggaagtgatctcccggcccatcggcgagacgggcacccgctgccgttacaccacgacccagccgctaaccttacagccgctcgcgctctcccgcgccagcgtcagggcgcaggccgacggccgccaggcgatttgtctgcgttttgactgtagcgcgctggtggactggcgggcgctcgacctgagccgtattccgttgtatctgaatgccgatgcgccattggcctgcgcgctgcatgaagcgctgaccctgaatgtggcgcacatcggcatacgtctggcgggggaggccgatagcaggccgctggcggcccattttgccgtttgcggttttggccatgatgatgcgctgctgccccaaagcggcgggttcagcggctaccagttgctgctggagtatttcagctttcgtgaaaagtttatgtcggtcgcgctgtgcgggctggagaatatgacgtttcctgatgcgccgggatggtttgagatcgaggtcgtgctggataaaccgtggccgcaggagtatgcgttgtcagagaaacatctgcgtttacactgcagcccggttattaacctgttcccgctggagtcggatccgctgcatctggattcactacaaagtgagtatctgctgcgccccatgcgcgtccaggatggacacaccgaaatctattcggtggagtccgtcacctcttcacgtctttccggcacccaagtgtatgtgccgtttaccagttttcgccacaaaggcggcatgttgcgccatgatgcgccggaatattattaccacacgcgcgttaaacgtggcccgtccgggctgcatgatacctggctgacgctgggcggcgaggcgtttgaccagcatcgcgtgccgcagaatgaaaccctgtcattgagcctgatcggcaccaacggccagttgccgcggcgggcgctgcaaagcacgctgctggacacggtggtcaaatccacgacgtcgcgactccaggtgcgcaatctcagcgcgccgacgttgccgtgttatccaccggatcgcgaccgttttcactggcgggtactgagccatctcggtagcagcttcctgtggatgatggataacgccgaggtgttgcgcggcgcgctggcgttgtacgactggacggacaacgaaatgaaccgccgtcgcctgcaggcgatcgtcgacgtgagccactgtgaggtggaacgttttgccgaggggcactttctacgcggcgtgcagatagaggtgacgctcgacggtaacggcttcgccggacacggcgacatctgcctgtttggcgagctgctcaaccgcttctttgccctgtataccgacatccatctgtttaatcgtctgattctgatactgcaacctaccggagagcgtctcgaatggcaggagaaccacaaacgccgcattcccggctgagcccgcggctggagcgggatattcagcgcatcaacttttaccgtttctgccagctactggaaaaatcgcgacctggcgcgccggcattaggcagcacgctgaacccggcggatgatccggtacgctttcgcccgcatccggggatgggttttccggtcagcgaactcaaagcggtggagtatgatgaggcgcatcccgacgcgccgccgacgctgcgcaccacctttatggggctatacggtgtcgattcgccgttgcccaccgcctggctggatgatattgcgcagcaaagagaagggcatgaggcgcaggaagcatttctcgatatttttaaccaccgcattctgagccagttttatcgcatctggcgcaaatactcgtatccggcaacctttgaagacggcggtcgcgaccgtacttcgcagagcctgctggggctgatcgggctgggcattcccggcaccgctcagcatattgccgcgccggtatctcgctttctggcattactcagcgtgatgcgcctgcctgcgcgtaccgaagagggaattcaggcgctggtacgattgttggcgccccatacgcgggcggaagcgtcgccgcactgcccacggacggtgtacccggcgcagccgctgggtttttacggcgataacgatttcctgcttgatggctacacggtgctgggcgaggaaacgaccgagattgccagccagttgctgatcgcgctgtacaccgatgatatcgccgaggccgcaggctggatgccggaagggcaaatctatgcggactttctggttctgctgcgggtttatctcggctggcgctataaggccaaaatcaccttaacgcttcccacgccgctgttacccgcgccggtacttggcgaaacgccgtttatgctcggcataagcggcgttctgggcatggagggggacgcggttccgccggatttaccggccacgtttaccacggaactgggcggctaccgcggcatgccgcttgcatcattatcacaaggaaaccaacgtgttgaatatcacttcgcttaaactatccgcactgattcttctgccgttcatgctggcgggttgtgggctaacacagaaaatcagcgacggcgcttcgtccgccgtaaagtcagtattttatcgccaggtgaaaacgctgcgtctggattttagcgcgcgcaatgcgttaaacaccgataaccgcgaggataacagcgcctcccagccggtgatggtgcgggtctatgtgctgaaggatcgcaagactttcgataagacggtttaccagcagctggcggcggagggggaggagatattaaaagacgaccaactggccagccgcagcctggtgctcaaaccgggaacggcgatgagtctcaccatgccgctggatgaacaggcgcagtatgttgccgtggtggcgctgtttcgggcgccggatctgacgaaaaacgactggaagctggtgcttgcccgtgaggatcttgacccggaccgcgcgcgcgtcattgaggccagccatcatcaacttgttctgcaaccgcggaaggagaagtgagaaacgcgctgcgcaattttatattccataaataacctgacggacgccatgatggccaaaccttttatctaaggtttggcctgtgagagctctcatttaaccgtgggcagatcgctatatcgggtagtgtatcgcggggagagcatttcccgcttcatctgccacggttgctggataccctggccggcgaagtaaagcgtcccacgtccgtcctcagcattcaggcggtccagtacctccatcagtttttggctattttttcgcggcgcattttcgtcaaacagattaagttgcgcgacgccctggctataaaaatcgcccagcatcaccccggctttctggtaccgacagccactttgccagatggcatccagacaacgcgtcgcggcggcgataatatctctgctgtcctgcgttggggtaagcagggtgaccgaggcattattggcgtaataccgttcatcaggcgcgaagggcgacgtttttacaaagacggagataaaccggcagtattgatgttcctgacgaagtttctctgcagcccgggaagcgtaactacagatggcctgacgcatttcttcgtactcggtgatgcgatggccgaacgaacgggaacagataatctcttgctttaccggggcaaactcttccagctcgagacagggctcgccgcgtaattcacggacggttctttccagtacgacattaaagtgtttcctgatgaagcggatatccgtgtcagccagctgcaataccgtccggatccccatcgtttcaagcctcttcgctatgcgtcgacccactccccaaacctcttccaccggtagcgccgccatcaattttctttgccgctccgcattcgacaggtcaaccacgcctcctgtctgctgttgccagcgttttgccgcatgattcgccagtttagccagcgtttttgtctgggctattccgacgcccaccgtcaggtgtgtgcgttgccgcaccgtggctctgagctcatgtccaaattcggtaagaacgcggcagttacgcacgccggtaagatcgcaaaaaacttcatcaatggagtatttttcacagcgaggcgacatctcttcaagcgtcgtcattacccggttggacatatcggcgtagagttcatagttgctactgaagcaaaccacgccatgatgtctgaagatatctttttgtttaaagtacggttcacccattttcacaaacggtttggcttccgcagaacgtgaaatcacacaaccgtcattattggacaaaacaaccaccgggcggccgcgtaagtccgggcgaaagacggtttcacaggaagcatagaacgagttcacatcacacagggcaaacacgatcagcccgccgatttcacgatataggtcaccacgccaaaaatttccagacactcttcactgcctggcataatcggctggtaagcgggattatcaggtttgagcatgacaacaggatgtaactggaggcgcttaaccgtgaattctccatccactgcggcaataacgatgctgccatggacggccttgcgggagctatccaccaccagtaaatcaccatcgccaatgccagcgccaatcattgagtcaccgcttgatttcacaaagtaggtggcgcctggatgctgaatcagcagttcattcaggtcgatacgccgttcaacataatcctgcgcggggctaggaaaaccgcagggaacaagatcgctgaacagggggagtgccacgatctggcgtagttcgattagtgtgaaaaactgcatgatgatcaccgattatctttactgtatgtatatacagtattgtagatcgatggcagagatcaagagggtcgtaccttatcaaaacctgcgccagcgcccggcaggcggggggttttatgtctgaagccgattgataaacaatagattatctcatcgctaatattagcgactgcgccgtttagcgggcgaaaatagcgcgacgattttatgtaaaaacaatctgaatatgactgaggtaaaggatctgatattaacgagacaggggatgtctgagcgattaacgaccagggattgctcaccggccgaccgtatgcaagagcaggccggtgagcaaatggctgtgatggcagttcgcagccgcggttattttaaagcgtccgggccggtttaaacatatttcttcgcgccaggagactattttcagacttacctcattaccgtttctaataagtcaaaccagtaattaacgcctgttaagaaagctccactactaataatgacggtataaagatgaacaaaagcacagagttgaataattaagagtattcctgggtgaaatctcgggcagagagatgacttctgataaatattcaggataatttattaatcttaaggaattagccccgcggctgcctgcaccataaaggaatccatatggttaatcggatatcgatcctgtcatctgtcgacagctcctcgttattattctggaaattcagcgggcaggagaaactgtccgaacctttccactttcaggtcgatttactcagccaggattttgctatcgaccgtcaggccatgctcggcaaaaacatgacggtggcggttcccggccaatggggacaggagcgttatctttccggcaaaatcaccgccgttaccgtacgcgccgaagatcttggcgagacgcgctacgccgtctatcagaccacgctggaacccgatttctggccgatgatgcgcgaccgcaacttccgtattttccagcagcagcgggtgccggatatcgtggccaaactgtttagcgagcataacgttaagtttgaggacaaacttacgcgtagctaccggcagtgggattattgtgtacagtacgcggaaagcagcttccatttcatcagccgtttgctggagctggaaggtattagctatctgttccgccacgataaagacggccataccctggtgctgatggatgactatcagcagactgaatccttccccggttatgaaactattccctggcatgcgcaaccgggcggcggcgcggtcggcgaagagggcatcagccagctgatggcgagccacgtcgtcacgccggggctttacagcaccgatgactatgattttcgcaagccccacgcctggatgctgcaaacgctgcagaatccggtctcgccgacaccgggcaaaatcgacgtttacgactggccggggcgctttatggagcacggcgacggcgaagcctacgcccgtattcgtcagcagtcctggcaggccgaacagcagcaaacgcagggtatcgccaccgcgaccggtatcgtcccgggacacacgtttaccctgacgcatgcgcctaacatggctgataacgctaaatggctggtggtgggcgcccgctatgattttgaagagaatcagtatgcctccggtggcggaaataccgcgcagcaccgcatcgcattcaccgttattcccgccgcgacgccatttgtccctgcgtcaaggaccgactggccgcgcacctacgggccgcaaaccgcccgcgtggtagggccgaaaggagaatcgatctggaccgataaatatggccggattaaggtgaaattccactgggaccgcgaaagccagggcgatgaaaatagctcctgttgggtgcgcgtttccagcgcctgggccggccagggttacggcggggtgcagatcccacgcgtcggtgatgaagtggtggtggactttattaacggtgagccggaccggccgattgtcattggccgcgtctataacgaagccagtatgccgccgtgggcgctaccggcggcagccacgcagatgggttttatgagccgttcaaaggatggttcgccggacaacgccaacgccctgcgttttgaagataaacccggcgaagagcagctctggctgcacgccgagcgcaacatggatactgaagtcgaaaacgacgagacccatgatgtcggcaataaccgcaccaaaaccgtcggcaaagacgaaaccagccatatcaaacagaaccgcacccgcacggtggatggcaatgaaagcgttaccgtcggcaaagatcgcagcaaaaccatcaatggtaatgaaaccaccaccgttgagcagaaccgtaccgaaagcgtgaaggggaatgagaccctaagcgttgagcagaaccgcgatgaaaccatcagcggcaaccataccaccacggtgaaaagcgaccataccgcgaccgtcgaaggcaagcagtcactgacggtcgtacaggatcgcacccgtcaggtgcagggtaacgaaagcgtcagcgtccagcagaaccgtaacgtgcaggtcaccggcaaccagacgctaggagtgaccggcaatcacgatatttccgtgaccggtaagcaaacgcagaccatcaccagtaagcaagaggtgacgatcggcgccgggcgtaccctgagcatcaccggcggtgatacccgctttacgcaagggagcgtaaccgacagcgctaccgataccgtacatatcaacgtgggcgaaagcggcattctgataagcaacggcagcgtggagattaccgctggcgggtcgacgatcaccattaacgccgccggcgtgatggtgaatggtaagaagattgagctcaatgcctgacagggaaagggaatgaacgcggcgaagaatccgaccgaaaaagtaatgagcgagcttgagcttagctggctggacgccagcgagcaggcggagcagatccgcttatttatctggcggacgcctgccggcggcgagtcgctgcttgatggttttatcgcgctgcagcagcatcctgaaggccgctcgctgccggatctgctgctggggctaaccacgccgtttgagaccggctatggctacagcgaggcgctcgggcgcgagtttgtggaacactacgaagcgacgccggatgccgctatatgggatgccgaacgctttctcccaacctatagcccggcgcagttgcggcagatgctgcaggattttgcgacgacatttcatgacgatttacgttatctggtgttggtgctgaaaccctccgccgtcagcgatgaaaaggcgttgaaccgctggttgaacggctggctggcgcaggaggcgtgcaacgccagactgttacttatcgacacgcttgagcaaccgatttggcagccgctgtatgaggcgcatccgcgcagggtacggctgctgaccgatgacgtcgacagtatgaaagtgatgcatcaaaccgcgcgcgggcagagcgatccgaatcccgatcgcctgctgtttcgccgctatctggctgacgccatgctgctgctggaaaaaggcagcgccgcgcaggtggccgcgcgcggcggtatggcgctcggcgtcgcccagcgctgcggttgggccgaccagcaggcgatgatgcataacctgatcgccggcggttggttgaaaggtaacgatcatcaacgggccgtcgaacactaccgccaggcgcaaaacatcagcggcgaaattgccgacccggcgcttaaaggacaactgcgtacccaaagcacttttggcgaggccggcgcctggttcgcgcgcaaagagtatctccaggcggcgaaaggctatcggcgggcggcgggcgaagcgcaaaccattccacacccggtatttgccgtagaaggctggcggatgtccggtttttgtctcaacctcgccgggcaccgggcaaaagcgatggaggagtatgcccacgccatccaggcggcggagccgatcccacggcaagagcgcgctcagaccacgctgccgctggcattccaggatctgctgcgcatccatgataaacgacggaccgaggtgcttgaggcctgcgcgacacgctggcaaagcgaaaaacagcgcttaatccaacaggcggaagaccgcttgccgcggcaacccgccgtcgaacaggtaaaacgcgtggaccggcagttacagctacagctggaagccgcgttcgcgctgatccgcgaagcgcgggaaaaactgatccgcggcggcgatgacagctttcgccgcgtgatccgcctggcgcgggagaagctgcatccgcactggaacggcctgccggagatcgcccacccctttgatgccccgccgggtgaatggcaaagcctgcctgcctggggaaataccgatgcatcatccactgaaaatgcagggagcaacccgctatgaagacccggattattattattgttgccgtgacgctgctggcaatcctgtttttaagcctttcggacggcgggttcgccaccgaagtgcgcaccttcctgcgcgcgctgctgcgcgccatgttctgaggcgcgtctgatgcactccggggctcacttcgacccgcagcttggcctggatatccatacttatccctggccgctgccgacgccgcatatcggcatcgttttcgacgtgtttgattatctgccgctgctgggcactaccgtacacgtcaacagcatcaaacgcgccagcgcggggaccggcggtattgcggtacatattccggtcggcggcgtgtgggtgccgccgctgcgcgcgcccggcggcccgcagatggaagacgagctgtttatgggcagcaaaaccgtcgccgtcgatggcgaaccgttttcccgcatcggcatgccggtactgagctgtaacatcctcggaatggtgccgccgttccgcctgaagcggctgagcaaaccaaagccgctctcgctgacgctgccgctgacgtttaacctcgcgattcccaacaacgtgattgtcggcgggccgccaaccatcaacctgatggcgctgctgatgcgcgccgggttaagcgggttgggcaaggggttgaagaaagttaaaaaaacgccgcagtggcggctgtttatgcggcggtttaaaaagctgcgccagaagctgtttcgcaacatggatcccggcgtcctgaaatgccgggtgctacgcgccgaaccggttgatatccgcgacggtagcgtgagcctggagcatgaggattttctgttacccggccgcctgccgctggcgtggacgcgaagctactcgtcggcggatctcgatgaagaagggctgtgcggttacggctggtcaaccccggcggacacccgccttgaaatactggccgatgaaggcgtcgcggtgctgactcagccggaagggatgacgctgtttgcggcgctgccgcagtccgacgggcgcgagcagggtattgtcggcctgccggacggcagccgcctgtggcgggaaacccgcaatggcgaatgtttctggcatgttgagcaggaagggagcgcgcggctgcaatttcgcggtaagtgcgggcggctggcgatttaccggctggcggaccgtaacggtaacggctggcagttcgactggcaggggcgcgaccttgagcgtattcgcgagttcagcacgtgcggcatgagcggcagggagatcctcgtcacctggcagaatagccgcctgcgggcgctacgcctgcgcaacgcgctggatgacgagatcacgccgctgacccgctatgaatacgatagcgataatcaattgagcgcggagatcgatgcgctttcgcatccgcggcgcttctactatcaacagcgccatatgaccagccatgtcgaccgtaacggccagggctttcattaccagttcaatgacgagtggcgggtggttcacgcctggggcgacggcggcgtatgggattaccatttcgcctggcacgacttgctcaacgaagtggaaatcaccgattccaacggccatgtaacgtctgtcagctttgatgataacggcctgccggtttcggagatcgatccgaccggcggcaataccgtcttccactacgatgattttggccgcaccgtcgaactcattgagccggacggcagcacgcgtcgttgggagtatgatgaacaggggcgaatgatcgccgaacatctgccggacggtagccagattcaggcggcctacaatgaagacggcgatctgctgacgctgattgatgagaaaggcgcctgctggcgttcggactacgacgaacgcggcaacctgctggcgggaacggaccctaccggcgtcacctcgcgctatcagtatgatgagtacgggcagctgagcgcggcggacgtgccgggttccgggcagagtcgctatcgctatgatcggtttggttttttgcaggcgctgagccaggccggcgcgggaaccactcaactgcggcattccgcgcgcggcaccctgctggagcgtattgacgccggcggcggcagcagccgtttccactgggacagcaaggatcggctggtggcgatggtcaatccgcagggcggcgaaattcgcgtcgcttacgaccgggaagattcaccgcttcacttcaccgatgaagccggccagataacccgttttcgttataaccgcaccggaatgctggccgcctgcgagacgccggatggcgcgacgcttggctatcagtacgacctggaagatcgcctgctggcggtgatcaaccagaacggtcagcgctggcagctggaccgcgacgcgctggggcgcatcgccgcggagaccgattactggggacaggtaacccgttatggctgggataaaggcaaccggctgatcagccgtgaggatccgctggggcggctggtgcgctacggttacgaccgcggcgggcggctaagcgagcggcgcagcggcgataccctgcaggcgaagtatcattacgatccctgcggacggatggtgctgtgtgagaatccgtggcggcggctggcgtggcgctatgatgacgccgggcgggtgctgctggaggagcaggacggttttcagctgcattatggctataacgagcgcggcctgctggtctcccggcgcagcgacagcggtcatcaggtgcgttacgccatggatgagtatgaccggctgagccagatccagctgaatgacgatgcgccaatcgtgctgggttacgatgaggccgggcggcgggtcagcgagcagctgtcggcggaggtgacgcgtcatttcacctacgaccggctcggccaactgacgtcgcagcaggtgttgcagaatgatttaccgctgttcgccagcggcttcagctgggataggctgggtaacctgacccggcgcgatgacagcctgtggggcagcgatcgttacgcttacgatccggtggggcgcttgacggcccataccgcgccggacggtacgctgcggcagtttgtgcaggatgcggcgggcagccacctgcagacgcagacccgggcggtgaatgagagcgccggaggctggttccgcgaggggcagcagcgcggggtgcgttatgtattcgatcgcgcaggcgagctgcgacagcggcgcgatgtccggcataacggcgagaaagaggatttcagctgggacgataaccgccaactggtggcggtgcgcaagggcgagcggctggtgcgttacggctatgacgggctggggcgccgggtgttcaagcagacggcggaagagacgcgctggttctactggcagggcgacgcgctggcgggggaaacggtcactatcacccgcgaaccgctggcggcacagagcatttttgataccggcagccggctgcagcggcagaaagcgcaggccgcgctgttcggcagtatgcgcgagtacgtgtactatccgggaagttttcagccgctggcgctgctgacgcaggaagcgggcaggaaggagagctggcactatcattgtgacccgaacggcgcgccggtccgcctgacgtcattacagggcgagatagtgtggtcagagaagacgggcgtatggggagagaaaggggaggtctacgccgatcgtatcagcaacccgctgcgttttcagggccagtattttgacgctgaaacggggctgcactataatcgacatcgttactatgatcctgaaattgcgggatttattagccaggatccgattggattagccggcgggctgaatgtttatcagtatgcgccgaacccgctgggatgggtggatccgtggggattagctaagtcatgtggtggaacaacaaaattttatcgttcaatgagtcatgaagatttcgagtatttacgcactacaggtaaattaagaggaacatctgaaacattcatttcaccaagaagagcattctctgagaattacgatggagttttagtgaggttttaccttaaaaacgatgcattatcagaactaaaatcaattggggttaaagattcagcagtacttaccagtattacttatccggacatgccagatgtagggaagggatggaaggagacaagtgcattctttaaagctgaaggggaacagattaatattggattaggtaaaggtaaggcattagatatattcaatcaagggattcagcgattcgagaggttaaattaacagcatatgaaaatggataaaaaacaattaattgtctctttaatgaaaagagaaattgatatctcaaaattttataatgatttcaatgcattttacggtgaacttaacatatgctatgaacttgaattagctcgtcaaaatagagatgctgaattagttgatgtttttttatatttgtcagctcttattaattatgattttaagtgtatagatttattgaatgaattgataatagctgattggcataaaaaacatgaggatttagcaacgattctaaattactatcatagtgagactagtgttgaatacttatatcaagcggcgttgttagaactaaattatagagactatgatgaggattatgttctggcagataaatgtattagggcgctagccaaaataaacaataaaaactcaatcgaaaaattggaaaaattggctatggtagaaaatgaaaaaataaaaaaaagcgcaatgaaacaattaagtaaaattagttgagctaatgggtgttaaaagtcgcctgtccattacaggcgatttagaaaaatatttaaaactaatttaaagttggaaatgatatgttttttctgtagggataagcgttttcgccttgcaaaaatcgcctaaagagacgaggttgtgaatctcctgtacctgatgggtgatatcatgtagattaacaatccattcattacaaaaattaatgactgcttggtttcgaattccaatttgtattgtacggtaattaagtttatttagatgaatatctctctcaggatcccactgaaatataatatctgaattctttattttatcttgccattcttctttattttgaaaggttgatgctgaatgataatcacttggcacccctaaatgaagaattttttggaatgcgtcatgactcaagtctatagctaatattctcgtctgattgctgtcttttttcccccagccagagcgatacatcatccataaaaatgatggcttaatccatgtcattctagtcaggctaaatgggggagaaacgaacgtattgtttttaatcgcactatcagctatttcatcggaatatgcctgatagacacggataaaatcttttgtgaagaaggctctaatttgccgttctgggattgagtactttggtaaatgcttttccatcaatagttttaattgagttaattagttaaatagatattatacatggaaagttactctgataaaaatgtttcgtattgttgaaacaggcttttcccagaaaatgctacgacagaattcataataatatatcaagcagacggtggaagagacgcgctggcgggggaaacggtcactatcacccgcgaaccgctggcggcacagagcatttttgataccggcagccggctgcagcggcagaaagcgcaggccgcgctgttcggcagtatgcgcgagtacgtgtactatccgggaagttttcagccgctggcgctgctgacgcaggaagcgggcaggaaggagagctggcactatcattgtgacccgaacggcgcgccggtccgcctgacgtcattacagggcgagatagtgtggtcagagaagacgggggtatggggagagaaaggggcggtctacgccgatcgtatcagcaacccgctgcgttttcagggccagtattttgacgctgaaacggggctgcactataatcgacatcgttactatgatcctgaaattgcgggatttattagccaggatccgattggattagccggtgggctgaatgtttatcagtatgcgccgaacccgctgggatgggtggatccgtgggggctaacttcggtagacgccacaggatatagtgtttacggtttatttgagtctggtgcgaaagaaccttattacgtgggtatcactaatgatatggatcgaagaagaggagagcatcttgatacagaaagattatcaccagattcgaggatggaacctcttgatcgaaatgtaacttatgggcaagccagaggttacgaacaatattacattgaaaaatataaaacgagaactgggaagattggcgaagccatatcatcaaccaataggggtaataagtataattcatttgatcatggacggaaagatgctcgtgcgaagtcatttaaacatgcttataatagtaaaaagaatgggaggaaatgttgatgagtaattttaaattttggggatgggataaaaaaccaagaaccatgttacgctttgtaaaaccaggagacatattttgtttaaagtttgatgagagtaattattattttggtagagtcatatctaaaataatcactggccacgtagttgaaatttttgattttgtatctactactccagagttaaccgaagaagatatatcaaaaagaatcattcctccaattgtgattgatacatatacattatttgatacaaagaaagaaaaggggagtgactggagaattatcggacatcaaaatgattatgtacctgaaaatgttgatgacgtttattttgtttatggggtaggtgattcatgcaagaaagtggatgtttttgataatgagtacaatatatctgaaaaagatgcggatagttatcctcgcctgacaccacatggtgatcatcaggttaaatctttattgaaaactggaggccggtgagatataaaatcctttcgactttctctaatgagtttaaaaggagggaggattacaatctcattatgaatcacaacttagatgggcgataaataacttttcaaaataggaatatatcattgtgatccgaacggcgcgccgatccgcctgacgtcattgcagggcgagatagtgtggtcagagaagacgggcgtatggggagaaaaagaggaggtctacgccgatcgtatcaacaacccgctgcgtttccggggccagtattttgacgctgaacggctgaataccttacttacctctcacgcggcgtcgccttcttactactgtacatcgctttatctgcactgttcagcaatgtatcggcatccgcggcatcgtgagggaaaagcgcaatgccgatgctgccggaaatcgtaataacatgctcgtggatcaaaaatgactgggttagcgcattgctgattttttccgccgtttgtcgggggagcggatcgtttgcctttaaatcggggagcagggcgataaactcatcgccaccgaggcgggccaccgtatcaccttctcgtaaaacgctttgtagacgaaacgccaccagccgcagcagttcgtcacccacggcgtggccgtaaatgtcattcactggcttaaagcggtcgagatcgataaagagcagcgccacttctgtctcattggcgatggcctgcgttatcgccagctccaggcgattactcaacagtctgcggtttggcaatccggtcagcgcgtcgaagtttgcatgcagccagaccacctgctcccgctgtttacggtcggtgatatcgcgaataaacgcggagaaaatctgcttgcctgattgctgatgcggccagatcgacagttctatagggaatttgcctttagttcgatgcagggcggtaatttcgatggtgcgattaaggatattcgacggctgagccgcctgaaagcgcattaaaccacgcgcatgctgctcgcgaaactcttccggcacgatcatctcgcccaggttgttgccgatagcttccccagcggaccagccgaacattctttccgcggcctggttccagttaatcaccacccctgcatgattgatggtaatcaccgcatcctgtgcagtctcaaccagctgtcgatggttctcctcgctttcggccagcgctcgctgcatcgactcaatctcgctgatgctctcctgcagctcacgatgcatttccgcaagcgaaagcgagaaaaagcgaatacgctcttctactgacatatttttcatttcggcgtacagatcgctggcgctacgtggtggcataaggcgttcctgatgggtcgaagagaatattcagccaatttaacaataagtgtagttaaaaaaagattggctgctgacatctcagctattttatctattaaataaaatctattgtaaatttgtccagatttaaatttaacgcttagttacagatggatcatattccggcggtaataatccgcactctttataaagcgtattaaggacaatttatcgtgaatactttcttgcgtaacaccctggctgccgtagtgatgactgcgggtctttccgttgccgctcaggccgcgacgacagccgaagtgccgccgttatcccaggacccggtggtacaacatctcaagctgagcaacgatcaggtcagcaaaattcaggccctgcgtcaggagctggaaacaaacctcaaaaatatcaaaattggtggttaccaggatggtgctctggtggatgtgattcagtccggtaaatgggacgatgcgaaagtaaaacagcagctagccgcttttgcgcaattggatcagcagacgcgttattaccgcgtgaaatattacttcggcattaatcaggtgctgacggctgaacaacgtgagcaggtaaaaaaagatctgcagcaggctctcaactaagcaacgttcgcatgctccgctacccagcggagcatagctaatgactttcctcaatgaaaagacaagggtgtcatcatgaagaagtttctctttattgcgctgggaatggccgcgttgtttagccaggctggcgtcgccgggactaaaacgttggttgattatggcgtcgtacaggaaagccatattattagtactccgcatcagcgccagccgcttcgtacgctcgcggcaggaacgctgggcggcgtggtcggccatcagttcggcaacggaaaaggccagacggcaatgaccgccgcaggcgctctggccggagctggcgcttcacgctatcaccaggatcggcagcagggcgctcagcaggttgaactgctaatcaaaaccaatagtgggcaggtgatacaggtgctacagggttacgacggtcggcttatcttcaacaagggagataaggtgcgtatcctgacgtcgggaaatgatacccgggtggataaatcggtgtaatgcgccaagcgggagccaatatactcccggttggcgtgacacgttatgctgatttcagcatatcaaagcggataatccgcgaacgtcccagctctttcgcccgatacagcgcggcatctgcagcacgtagcaggctgtcgctttgcgcgtgttgcggatagctggcgataccgatagagacattcacctggcctatatccgtcagcccgcagcgtaaagtcatatttctcacgttgttgtagatttcagtcgcgcaggcttctgcgctggcctcatcgctgccggaaagcaacaccaaaaactcttcgccgccatagcggaatgccaggccaagatcgcgtaccgcgcgctggatgatcgccgcgacgtttttaatcaccagatcgcccgcctcatggccgtaattatcgttaaccgccttaaagtgatcgatatcgatcatcaggcagctcagcgggctgttgttgcgcaccgccagattcatctgcgtatgcagcgcttcctcaagatgatggcggtttcgcaacccggtcagagaatcaaacaacgctttttccagcagagcattgcgcagacgctggttggatagcgccaggcccaacgcttccgccatgagttcaagataagcgcgagagggggctgtctcactagtgacattacgaaaagagagcaggccaatggcttcaccctgcgcgataagtggaacgcacaatgattgctcgttgcattcttgcggcagatgatagcaggcgatgtccggttcgccgttaaccggcggatggctcaggcctcgacgtactgcccagcacttatcgggataaaacacggccgcctcgtccggcggcgaaagccactgcgcgacgcagcgcatttgccagggatcggtatcaagaatatacagtcggccaggaacgtccggcgcgatattgggggcgaaaagttcagcgaccttcaccacatcctcaaatgattcacatccctgcaagcgttgagtcattcgcgccagcagttcacgaacggcccagtcggcatcgcgttgttgttcaagacgctggcgggcaaggccattttcgcgaaagatacggatcgcctgcgccatatcgccgatttcatcaatctgtttgaagtgcggtggttcgacggcataatcctgcgatgccagacgctgtaccacatcgctgagtcgtaccacaggggtgagcacccggcgtttgagaataaagccgagaacaaataaaaacatcaaggcggtcaggccaaccatcgcttccgaaagcgtccgccagaggcgtgatttttcagtcgcttgctgcatggcgttgtttgttcgtccttccagcagcaggcggaaatgatcgatttgcgtttgcacccgctccagctcctgctcataaggcttaccgtaaacctgcaaaatcgcctctttctcttcgccacgagcgacgcgatcgatggcggcctgctgttcatcttgtaattcatcgacaatacgcagaccatcgtgcaacagcgccagctcctgctggctggcgccaacatcttttagtttaagcaatcggttttcaattgattcgagcgtttggacctgctgatgatactgttgcagcgtctccggttgtttttcgatgacatacagtcgcacgagatccgaaagctcccacgcgtcgcgttctatctcatcgacaagacgaacgaacgtatcccgttgttgtacagcctggcgttcagcgcgatcggcgccggaagcgattagcatcgccataccggatgcaatggtcagccctacggtgatcccgtaggcccagttagtcatggtggcgattctcaccgggtatttccttgcaggcagatgaacgagaaatgggtatttttattatagagccccgtagccaaccggaaggttcagacgcgcggtatgcgggtgacgaggtgatgtagcgcctgggcatgctggcgcaatacaagatacacatcgttatccagagcgccatttataacatcagcttctataagatgtaacgcctcctgatacggcataccgagccgatacgggcgatcctcaacgagcgcggtgaaaatatccgcaacggcgataattctgtccggaagttgtaaataacgatgatttaaattcagcgggtagccgctgccatcgagtttctcatgatggttagcggcccaatcgatgatttcccccagatcggtgaaatctcgtaatatttcaccggtcatatagctatgctcgcggatcaattgtgcttcgtcatcgctaagttcagcctgtttttcgaggatcgccagtggaatatatattttgccgatatcatgcaaatagccggcaatttcaattttacggcacaccagcggcggtaaattcatatagacggcgagggcataagaaatttcgccaaccatgatgctgtggctggcggtgaaactactgtaggtatcaacaattttcgcgatcagcaaacaaatatctttcagaccatcgatgtcaatatatacgtcgttaatcggccccacaatttccagcaaccgctgaatatgctctgcttgcatatggcgccagaaggtagggtgttgcgctagttcacgcagagtatcgcaaagtggtggatcgatatcgcgatagtcagcgacaaagcgggcgacgagcgccttttgttggtctggagcaacgacgccttgcgtaggaaggagacgctcaaagcagtccgcaaaatagacgatatgctgctccagagtgcctttgcgggttggatcaaagtgatgatcgccaataatagggctgataggggtaaaagtatccagcccggcaagcatctgtacgccacggatttggtgcgggtcataaaggttgtctatcgcgtttagcgaatcaatgcgccgcttatcgccaagcacgccgatatcatgtagcagcgcagccagaaagatggttttttgttgcgacgcaggaagatccaacgccagcgataatttgtagcttatcagcgccgtgcgctgtagatgcagatccagccttgggttgatggcgttaatgacgcgcgtgaccagcattaaagccgactttaaggcaatacgcatttttctctccgtccatgcaatccgctgttgccgttaatcctgtggcgccggcaagcacgatcaaatccccctggcgtctgacaggtgaatcgacgccagactcaaacgccacccacttatgtgaacaactcattttagctcacatagtcgctttcattgtggtaatagcgtgatgaatctcttcacagtttgattcatatctacctgtgatgagaagtgattgcttttacatcacctttcgcggcgctgtaagggcgggttggagcatgtgcaaatcggctctcatgttctgttcgcctctatttggcgaggaggcattggtcatggagttttattgcctgaaaagggcgaaaaataacagtaatgggacaattttatattgttgcaaacgtgactattagtctcaattatatacttttgtcagtattcatcagtaagtataaataatcctgttcttatttatattttacaataactaaaattataattagtcagtgcatcctgcaaatattattatctgcagtgatgatttttagtgaatgcattcgatatttgaatgtttgttggccgtttgagttcgggctgtgatgtgccgggaggcggcgtcagcagtggcctgcgtgaagttgtgtttgtaaaatcgccagatagcagtttaagtccattcctatatcggaaaaaatcattagcgcgaaaatgattatcagcgtaaatatgaatgaacggacttcatttttactttacattttgtaacatctgtgtatctattatgtattttagcgttaagtgtaattttttcttgctgccgtgaatttaccaggattactattgtcttactcgttgtatcgcctaatgacagatgaagggactcgttttttccttaagcgttaccctatattttaatgtttacaggaaaaaccatgtcttgcgcctttaaaaaaaatctactgcttccccgctattgggtgacctggtttggcctggccattctttggttaatcgtccaactaccttatcccgttttacatacgctcggcaccagcgcagggcgactatcccgtcgcttcctgaagcgtcgggaacacatcgcccggcgtaacattgagctgtgcttcccggaaatgtccagcgcggctcgtgaaaagctgctggaagagaactttatgtccctcggcatggggcttatcgaaacgggtatggcgtggttctggagcgatgaacgcgttaagaagtggtttgacgtcgaaggcatcgccaatctgaacaatgcgctcagcgccgataaaggcgtgatggttgttggcatccactttatgtcactggagttgggcggccgagcaatgggcttgtgtcgtccgatgatggcgacgtatcgcccgcacaacagcccgcttatggagtgggtgcagactcgcgctcgtctgcgctcgaataaagcgatgatcgaccgccgtaatctctccgggctggtgcatgcgctgaaatccggcgaggcggtgtggtttgcgccggatcaggattacggcccgaagggcagcgtatttgcgccgtttttctcggttccacaggcggcgacgactaatggtacctgggtgctgtcgcgcctctccggttcaaaaatgctgagtatcagtatggtgcgcaagctggatcgaaaaggctacagcctgcacatcagtgaagtgatgaatgattaccccggcgaagataaacagattgccgccagttatatcaacaaggtcatcgaacgagaaatcctgcgtgcaccagagcaatacctgtgggtgcatcgccggttcaaaacccgcccgcttggcgaaacctcggtatattagtacaacacttgcgctccacgctttcaaaatgaccgcagttgcgttaacgtgagccggatcatactttttgttgaaagcgaaggagtgcagcgtgttcgctgagtttggtgttttgaattatctgacctacctggtcggggctatttttatcattctcgtaccaggtcccaatactttttttgtactgaaaaccggtatcgcgcacggcgttaaaaaaggataccttgccgccgctggcgtgtttatcggcgatgcggttctgatgttcctggcttttgctggcgttgcgacgcttatcaaaacgaccccggtgctgtttaatattgtgcgctatcttggcgcgatttatctgctttggctgggcgccaaaatgctctactcggtatttaaacagcgcgaggggcaagatgccgccgatgctgagccggggagcgctatcctcaaacgctcgttaaccctgagcctgactaacccgaaagcgattcttttctatgtctcttttttcgtccagttcattgacgttaatgcgacatcgccgggcatcgcgttctttatcctggcgctgacgctggaggtcattagctttgtctatatgagcttccttatcctttctggctcgtttgtgacgcgctatgtgaaaaccaaaaagaaactggcgaaattgggcaacagccttatcggtctggtctttgtgggttttgccgcccgcctggcgacgctgcagtcctgatcccggaaacgatctgccagcgataatcgctgtgttgtaacaaaaacccttcaatttttattgcattggtgttacatatacagccgattatcgctcacagagaagggaacccggatgattctgcaaaaaatcctcagtaataaaaacggcaagaagtttctgttgtcgatggcgacagtttttgccattgcgcttgccgtcgtgggccgcgcaacgttcggtggcgtggtgagcgagtacaacatgccgtactcggagtggacaacctcgatgttcttcctgcagggggcgatggtgatggtttacagtaccgtgttcaccgtgttatttgctatcccgctgggctttctgtttttaggttctgaccgtcaggactaaatgcaaaaaaggcgaactcttgttcgcctttttgaatgatcctatctgtcaccagccacgatcatgatgatggtggtggtggtgtcgatgatgataaccatcatccacgatacatcccgataacagcgtgcacagcgcaataatcaacggtaacaccatcggttttttcattactcacttctccagttaatgcccgctttgctgcataaacacagcgaagcggctgatgaaatgagtgtatcgtcttaacttattgagtagataagacaactccgcaataccggggcggcgggaaaatttgagattaccaccagcccaattcggtgccggcgaccaccacgatggcgacaataatcataatgatggttgtctttttcatcatgccccccctggcgccgcatagccgccaacaaaaaaccagcccagaaagaccacggcgacaatgaaaatcaccaccggaaaaagaatacccaatttcatgcttagttcctgtctcttaacgtaatgttatctatcatactggaaagttatgctttctggtcgatatcgaaaatggtcagcatgcggcgtgcgtttttgtcgtggtacatagcctcatccgctgcgcgtagcgcctgttcaacgtccatattctgcggatcgacatcgatgaccccaaagctggcgccagggtattctataccgtatccggccaggcggtaacgcccggtaagctgctggcgcaggtgggcaataaacgcttcctgctcaggggattcaagtgccgggccaatgattaaaaactcatcgccgccgaggcggccaacggtatcttcgttacgtacgttggcacttaatcgttcacctatctggatgagaaaactgtcgccgcaggggtggcccagtttatcgttaatcgctttaaaatcgtcgagatcgataaaaataagcaggagcctgcgctgctgggcgcgagcttgggtaaacagcgttttaagatgtttaaacaacgcgcggcggttggccagaccggtcagttcatcggtattggagtgcatctccagcgccgcatttgcgctacgcagttgctgaaccagcgtctctttctccacgtaatgggagatcaggccggcgaacaatgtcattacctgctcgccttccagattatagggctgtttgacgcggcttgtggcgcacaacgtaccatataacgaaccatcggcaagatggacgggaatactaaagaacgtggcgatcccgagttcctgcgcggcggtgcaggaccgccagcgttggccaacctcgttgcaaaatatacagttatcatcgattgcgcgtttgcaaagcgactcgtcccagggaacggaaaaaccttccgggatctgcatttcgctgctgttgtgggcatacatgactaactggcgctgcgcttctaaatcaatccgcgtcaggtatgtggactccatacgagtcaccagttccagcatttccagcagttgtcgcaccaacgtttcgagcgttcgttcggtagcaagcgtctgtgagacgcgggcaagaatgaaatctgacatgaatgaaacggcccccggaggttagcgcagcactgcgagctggcgcagcgaacagctaataacaaacatatttataacgaatgtatcacatttagcagggggatatctgctatcgcgacggtaaaaaaaagccccatcgggggcgatggggcaaaactcattgattatggaatgatctgttctctggtcaattcgagaacgagcgctactctaaagggcaaaagtgtagttaaaatggagaaaccgtggagattcagggcgaaaggtcgctttgaataaaacaggagtaattatgaagtggatagtaatgatgttgccgctgatgctagcgggctgcgctcagtcacaacagcctgatgcgccgccgccgccaaattcgatcggtatggccaatccggccgccgtctattgcgaccagaagggcggtaagcaggttccggtccagacacctcagggggtgcgcaccgactgtaaacttcccagtggtgaaacgctcgatgaatgggaactgtggcggcgcgatcatccggcgaagaaataattcgctgccgttagattaagcttttcagccactccgccagcaccagcgcatggttttgttgtgtatctttggccgcgtagagcagcgttaagggttgctgattggccaatttggcgagccgtagcccttcatcgcgatgggtttcaagctcttcgcggtactgctggcggaagtgagagaagtcaatcacttctccgtgaagagccttgcgtaaatcgctggaaggcgtcagggttttacaccattcgtcataatgcaaatcctctttttttattccgcgtggccacaggcgatcgaccagcacgcggtaaccatcgctgccctctgtagggtcataaacgcgtttacattgaatcatcattattctcccgtcgttatgtctatctggcggcttgcccgtgccgtgtgccgctaaataaccattgtgttccgcgaatgatatcgctaatctgaggttccttgtgttgcccgataatcctcagacataaggatcctgctatgaacacccctttgcgcattgcccttgttggcgattataaccctgatgtgattgcccataaggcgattccgctggctatcgatgacgctgccgcggttctggaacaaccggtgagttatgactggatagccaccagcgagattaccagcacagaccggctcaccgattatgacgccatctgggtggttcccgccagcccgtataaaaacgccgagggcgcatttatcgccattcgctacgcccgcgaaaatagcattccgttcctcggtacctgcggcggcttccagcacgcgattatcgaatacgcccgtaatgttatgggatggcaggatgcggcgcacgccgaaaccgatagcgaagggcgaatggtcattgcgccattaagctgttcgctggtggaaaaatcagacgctatcgagctgcgcgcgaacacgctgattgcccgcgcttatggccgtgacagcattgaagagggatatcattgtaactacggcattgccgaaagctttgcccatgaactggagcagggcgcgctgcgggtgaccggttgggatgagaacggcgagatccgcgccgtggagttaactacccatccgttcttcgtcgccacgctgttccagcacgagcgcaacgcgctggaagggcgtccggcgccgctggtacaggctttcctgcacgcggcccggcaataaaaaatcggcagccctggctgccgactcttgtgattaatgaatttcgcgcgcccttccggcaagggcgccgaacagcgccatgaccactgcgatgagtgcgacgatgattaacggtatatgccagtcgccgtaagcatcatggattttaccgatgagcggcggtccgcaggcagccagcagataaccaatagtctgcgccatgccggagagggccgcggcctgatgcgctgagctggcgcgtagaccaataaacgtcaggccaaggatcatggtggcgccggatccgaagccaaaaatcaatgtccagatcaccgcctgaccgggcagtaaccataatcccagcgtgcttactacgcacattaaggctaccagcacggcgatgccgcgctgatctttcaggcgatggagtaccagcgggatggccaggcccggcgcggcggttgccaactgcaacaggccatgcagagagccagcctgcgcttcgctgtagcccatactctgcaggattgcgggcagccaaccgacgataacgtaatagaccagtgagttaatcccaaggaacagcgtgacctgccacgccagcgctgaacgccagatcccccgattgtgcgcggcacccgatccggtcatcggcgtggtagcctggcggcgtgcctgcggcagccagagtaatagcgccaacagcgggaaaaccatcagtagcagcagtgcgccgcgccaaccaaaacccgccagcgccagcggtaccaccatcgcggaacctgccgccgccgctgcgcccatggtaatggagtaggcgccggtcatacgggcgacatggccggaaaaatcacgcttaattaaccctggcagcagcacgttgcccagcgcgattccgcagccaatgagcgccgtaccaatatacagccaggctgctgaggggagcgaacgtaatccgatcccgaggcaaataatcaccatcgccagcagcaggctacgctctatgccgaatcggcgggcgacgccggccgccagcggagagaccagcccgaaggccagcagcggcagggtcgtgagcagcccggtttgcgccgtcgtcagttggtattcagcgcgtatcgcatccagcagtggggcgataccggtgaaagttacccgtagcgtggcggcgataaataaaattccgacaatcagcagcagtttgttgccgttggcagaggaagaaacaggactcataacgttctcagactaataaacagggtcgtaacaatagcttgtttaacggttgtttgaatcaagctaaaatgacagattatcgctaatataggacaatttgatgattggactgggtttagacggctatgaaccagacagcggacatgaagcggcgctggcgtttcgcattcaggtggtggacgacgagcagttcattccgcgccatcagcaccgcaaaggtcaactgatcctcgcgttacacggcgctttaacctgcgaagtggataacgccatgtggatggtgccgccgctgtatgcggtgtgggtaccaggcttgcttccacacagcaatcgcgcaacgccaggggcacaggtgtgctttttgttcatagagccgggggcggcgccgatgcctgagcattgctgcacgttaaaaatctcacccctggtgcgagagttgattatgacccttgcggaacgcggcagggaggcgcttgacgcgccgcctacgcagcgcctggtgcaggtattatttgatgagctaccgcaacaaccgcaagaacatctgcaattgccggtttcaggacatccgaagatccgccggatggccgacaccatggcccgcgatccggcacactggcagacgctctcgcagtgggcggcggcgttcgctatgagcgaacgcaacctggcgcggctggtggtgagggagaccgggcttagctttcgccgctggcggcaccagcttcagctgatcctggcgctgcagatgctggtgcgcggacagacggtacagcaaaccgcccagacgctcggttacgattcaacaaccgcctttatcaccatgttcaaaaaagggttagggcaaacgccgggccgctaccacgccagtttggctaagcctttccgataaaaagcgaaataataccggcggcgataagcggcccgaccgggacgccgcgaaatagcgccacgcccagcacggtacccaccagcagcccggcgaccagttgaggctgcgaacccatgagcgcgactccgcgtccgccaagccacgagacgaacacgcccacggcaatcgccagcagtgacttccagttgacgaaagagtgaatcagcgtcgagggcggtaacgttccgctggcgatgggagccatcacgccgatggtcagaatgatgataccgatgctcagcccctgcttttcaatccaggggaagaaaacgttaagcggtgtcacccgtacgatgatgagcaccagtattgagatagcgacagtggtgttatggctgataaagccgagtgccgccagccccagcaaaataaacagggttgtatcgaacatgccagaggtccttgccaaaataaaaaaagaaaacctgcttactctacgcataatcgcgtgaataaacaggcttttaatttatttgctgcaaataaggctaccagcgccgcccgcgaaccttgtcgcataccgacgatgcgctaaatgacgcgacggaacgcgaccagctcagggcgggcgatacgcagataatcctcggtattcataatgatcgatttttccagcaggccggcattaaaggctatctctgtaaaacgttcgaacagcaacgggtcggcgaccagttttagcttagggtggaagctaaaaggcggaatggcgccgaatacgcaggcggtaagggcatcgacttctgccgggctggcgagtgaggctttattgccgccgatatgctgagccaggcgagataaatcggcctgctgatcggcggcaaggatagccagcacgtgctggtttaccccattacctttcactttacagaccagcgctttggcgccctgtcccagcgcggtaccgcggattgcagatacggcttcacatttaccaacggcttcatgttccatgacccgatagcgggcctgttgctcatcaaggaggcggcataattgctggtgtatgtcggcggtctctggcgattgcatgttgcgatggttcctctacagaaaaggcaaagcttaaccccgcgcggcggtaatgaaaacttatctgcgaatgccggggctttttttctgctttttgttcatatacaggcgcgcatcggcagctttcattgcttcgctgagcaactgttctggcgcaagacttgctgcgccccaggagaaatcgacgcgctgttgatggtcatgaatcgccagatattgccggatcctcgccgggatattttccgcttcagcttccgggtaatcgatcagaattagaaagaactcatcgcctcctaagcgcacgccataatcgctgctacgaatggatgcggaaatagcctgcgccagtagaataatcgcttcgtcgccggcgttatgcccccaggtatcgttgatctttttcagtccatcgcagtcaagggccatcgttaccacgttaaccccttgcgcggtaagtcgttgcaggcgcgactccagcatcggggtaaggattttacgattataaagaccggtcatggtatcgctgatattctctttcgataccgagttataaaggcggaaatgaacccgcaccagatgcagtaatgcggcggtagagagtaaataaaacaggaagagtttccatgaactaagcagaaaatacataacatccagagacagcgttatccgtaagttttctgctacctgatgggtgtaatgggcgtaattcaacaggtgcgttttactatgatgtacctcaatgagtgcgccggtatcggaatccttcaaggtaatatccagatagcgccacaccaaaggtcggtcgctggtgtataacaaggcctcaatctctggcgcggtcacatcgaccatcactacgcctttcagcttatccttgaaatacactggcgttaaaaacgataaaatattctttcccgtcatcgcatcaacatacacggtcgagatgagcgaacgaccctgttctaaaccatcaaggctggcctggctaatacccagtttactgtcctgaagaaaattccagttctgtatcggattacttttaattctgacgggcgcataaaagtagatgtatttatttacaagatctatgtaatagcgaaagcgtttttctgatttgagcgtagcaggaacctctggctgccagctatcatttttggcaactgcgcgatcgaatgcctggagtgcaggaatatcgccccgccacttgccgcagtcggcatgcgcggcgcttagcgtgccatgcaactggggataggtatatccggcgatattcaaaccactgacatccccgttgtgttgtacgctattgcagacctgttctacctctgtttggtttggggcagtatccagcttacgcagaaactgagagatgatgagttgattctgatacttatcatagagaaaggtcgattctcctttttctatgatgtatcgcatatagcctgacatatcgcggtgggtagcgattaattcgtatacaagaaaagaagacgtcaacaccacaacgcctgcggaaataacatgtcgcagtaatttattctgtaatttcatgatgtttggattcgtcttacccgtttagctgattttatcatagtggataaacaggctaccagagcgtgggtgaacgaacggctggtcagattaactatgctgacaggtagtgtaggtgtggagaatgaggcagggcagactaactaaaatgcggcactcttcatgacgagtgtctgaagagtgcgcaggactggccaaaggccactcatgaggcggcggaggcaaacattttgcttccggcgagttgtgacatgacaggctgataaacatcgatagattcgatattgtcaaaagtcaccatgtcggatttgcaaaaaatgcatttcgcgccgaaggggtttttttcgctcacgtcaaaatgtgaggttctgtattgtgacccatggcagcacgggcatcggaaatgaatattgttaatcataattttatccttttatattattatgtttttttacattttgtcacttacccacagatgaatatgtaaatttctggtgggctgaactgcaaaacggaaaaatattttgcgttactactaaaaatagcatagctgacagattatgttatcaatttatgccattttgtgttgatttgaatgagatgcttcttatttatctactcaggtcaaagccgtcatcgttatcgtaaatcagaagttcgcatcaaatttagccggcgtttaaccgttttactaagtcataactcttattagtcatcttctatccagttttttttaatgtatcaaagcatacaggatttgatttgcagaagaatcttaatactattggagagactcaggaaaggtggtatcagcgatagcgcctggaggtgtgagtaactgcttgggtaatatctttctgtctttcaaatcgacgtagccattaacgcatagtagaaaaaatagtgcaagatttattttagccgtccagaggcccaatgcgtaaaggattaattcgacaattatcgaaatgtaaatgaacggaactgtggctggctattaatgtgttttagttacagaaaaatcagccagaacgggtatttatctggctgatttatgaggctaagtattactggtcgcgccttgtttatgaaacagttcgcggaacaccggataaatatcttcctgatcgcgaatatgctgcatagcaaaattctcaaacgtcgcctgcagatgttcatattcgcgccacagagtctggtgagcgcggcgggtgatttcgatatagctgtagtaacgaaccaccggcaatattttcttcgccagcagttcatgacacagcggcgagtcgtctgcccagttatcgccatccgacgcctgcgcggcgtaaatattccactgcgccgggtcatagcgggctttaacaacctcatccatcaacttcaaggcgcttgaaacaatcgtaccgccggtttcctgggagtagaaaaactcatgttcatccacctctttcgcctgggtgtggtggcgaatatagactacttcaacgtttttataggtccggctgaggaacaaatacagcagaatgtaaaaacgtttcgccatgtctttggtggactgatccattgaaccagaaacatccatcaggcagaacatcaccgcctgacttgaaggctccggtcgtttctcatagtttttatagcgtaaatcaaaggtgtcgataaacggcacgcgctcaattttagcccgtagttccgcaatctctttacgtagccgctcctcttccagcaactgcgctggttcgcttttggcaatggtatcgagatcgtcttccagcgcccgcagttcgcgccgtttaccggcggtcatcgcggttcgccgcgccagcgaattctgcaatgaacgcaccacgctgatattggccggcacgccgttggcggtaaaacccgcacgatgggttttgaactcgttcaactggcgttgctggttcttcttcaggttgggaagggccagatcttcaaacagcaggtcaagatattcatctttcgaaatctgaaagacgaattcatcctggccctcgccatcggcgctggcttgcccctgaccaccgccgcctccgccgccgccgccctgagggcgttcaatacggtcgttctgcacaaagtgatcgttgccgggatggacgcgattacgaagcccgccgcgcccctgatgaaacatcggctcgttaatatcgtccgtcggaatggagacggattcaccgctgtcgatatcggtcaccgaacgtttattgatggcttcggagatcgactgctttatctgcgccttgtaacggcgcagaaagcgctgacgattgacagcgcttttgttcttcccgttcaggcgtcggtctatgaaccaggtcatatgccctcctgtactgcatttgccaactgtaccctgatgttgattagggtagatgtctttcgttatacgagcagtggtgctgaaacccggcagccgcggctaccgggttggtcgctatcaggacgatttacgtacccgcaggtaccattcgcacagcaggcgtacctgtttacgggtatagcctttttccatcatgcgatcgacgaagtcgtcgtgttttttctgctcgtcggtagacgttttggcattgaacgaaatgaccggcaacagctcctcggtattggagaacattttcttctcaataaccgtgcgcagtttttcataactggtccagttcggattacgtccgctgttattcgctctggcgcgcagcacgaagttgacgatttcattacggaaatctttcgggttgctgatcccggcgggcttctcgattttctccagttccgaattcagcgattcacggtcgaacagttgcccggtatccggatcgcggtactcctgatcctgaatccagaaatctgcataagtgacatatctgtcaaaaatgttctgtccatattcggaataagactcaagatacgccgtttggatctctttgccgataaattcggcgtatttcgggatcagatagcctttgaggaattccagataacgttcggcctgctcttgcgggaactgttcgcgttcgatttgctgttccagtacgtagaacagatggaccgggttggccgccacttcggcatgatcgaagttaaacacccttgagagaattttaaaggcaaaacgggtagagagaccgttcatcccttcgtcgacgccagcgtaatcacgatactcctggtaggatttcgctttcgggtcggtatctttcaagctttcgccgtcatagacgcgcatcttcgagtagatgctcgagttttccggctctttcaggcgcgacagaatagagaagcgcgacagcgtttcaagcgttcctggggcgcatggcgcatgggtcagctcactgttattcaaaagtttttcataaatacggatctcttccgagatgcgcaggcaataaggcactttgacgatatagacacggtcaaggaacgcctcgttgtttttgttattacggaaggtcacccactcggattcgttggagtgcgcgaggataatgccgttgaacggcagggcggagataccttcggtaccgttatagttgccttcctgggtcgccgtcagcagtgggtgcaatactttaatcggcgctttaaacatctcgacgaattccatgatcccctggttggcgcggcacagcgcgccggagtaaccataggcatccgggtcgttttgcgcatagtgttccagtttacggatatccactttccctaccagcgccgaaatgtcctggttattttcatcaccgggctccgttttggcgatggcaatctgttcgaggattgacggccacactttcacgacgcggaatttagtgatatcaccgccgaactcgtgcaggcgtttagccgcccacggcgacataattgtgccgagataacggttaggaatgccgtattctttattgaggatctgcgcgtcctcctgcgggttaaacaggcacagagggtgatcgttgaccgggctgcgttcgccattcgcgctcagcacatagattggcaccctttgcatcagcgatttcaggcgttccgccagcgaggatttaccgccgccaaccggccccagcagatacagaatctgttttttctcttccagaccctgcgcagcatgtttcagataggaaacaatctgctcgatggcatcttccataccatagaactcttcaaacgccggatagcgtgcaacaacccggtttgaaaagaggcgggacagccgcggctccagggccgtatcgaccatgactggttcaccaatggccgtcaatagccgctctgccgcgttggcataagcactgcgatcttgccggcagatggtaagaaactcctgcagtgtgaactcttcgtccttggcagcttcatagcgctggcgatagtgatcgaatatattcatggcatgccgtcctttcgttttttagcacaggttgagagccgttcatatgaatagtaggggcccccggaaggagcaggctgaacgacatcctttacttatcagcaaccctcgtgccaggttacagaagcgatttggataacgtgctctgcgactacaccttctaaatttaagcgtagatgcatttagaaaacttgcatgccgctaaaactcaatttcaatgacatatcaataactcatccggaaaccaggcaatttttcgcatatcttgccaaagcctttcatcaatgtgtcatgaagtcgcaagagggcggtcatcaagcagtgggaaattgttcggtttagtgtaagagcaagtaaagcatttgaggcatgacctctacgacgttaaactgcacgcgctaattatttgacaacaggaatatggatcgtgactaaaatcaaacttctggcactgggtgtgttcatcgcgacgtcagctagcgcagcgcacgctgacgggaagttaacgctgggggccggcgtgggcgtcgtcgagcatccttataaacaatatgatgcagatgtttacccggtacctgtcattagttatgaaagcgataacttctggttccacggtttgggtggtggctactacctgtggaatgataccaacgacaaactgtccgtgaccgcttactggttgccgatgtatttcaagccgggcgacagcgacaattcgcagatgcgcaagctggaccgccgcaaatccaccatgatggcgggtttgagctacgttcataacactcagtacggattcctgcgtacgacgctggccggcgatacgctggacaacagcaatggcattacctgggatatggcctggctgtaccgttataccaacggcaacctgaccctgacgccgggtattggcgtggagtggaacagcgacaatcagaacgaatactactacggcgtctcgaagcatgagtcgaatcgcagcggcatgcgcagctacgatcctgacagcagctggaacccgtatctggagctggcggcgaactatcgtttcctcggcgactggagcgtttacggtattgcccgttacactcgtctgtctgacgaaatcaccgatagcccgatggtggacaaatcctggagcggcctgatttcgaccgggatcacctataccttctgacagtgcacttcaacagacttttttgtgcatcaaaacagggcgttatgccctgttttgctatattacaattcgcgtttaggccgggtggcggctacgccttacccggcctacgggtcgagcccactgtctcctggaaaacacggtgttaagtaggcctgataagcgaagcgccatccgctcacgtcagacgcttgtcggtcttaacgcttcacaacgcgaatagtctgcgccaggcgagtgggtttctcttcgctggctttctgcggcacggtcacgcagcaggtttccacgcaaacaaaagttttgtagccatcatccggcatatcgcccatgctgacggaaagcgccgggcccgggttccaggcaacgacgttaccgtgatggcgatggatcacgtcgatgttgcgctgcaggacgtcatcatgaatcacgctgcaggcttcggcattgagataaacgcggtcggtgcggtccgggaaggtctggatgccgtccttcagcacaccttcttcggcattcagcactttatcgacatagcgatcgccaaggccgctcactttgactgccgtgatatcgccaacgttgaagtaggtgtgcagggcggaggtggtttcaaactcgccgtgggcttccagttcgatctcgcaggtcttacccagcttgaagcgcgcatacagcgtgaagtcgtgaggccagtatttgcgggtttcgtcactgctctgcagttcgaaggtcagcatcacgccgttttcatcttcgtcctggcattttagcgcccacggcaggttgcgtgcgaaaccgtgcgacggcagtccctgttgcgctgacggaccgaaccatggccagcagatgggtacgccgccgcgcagggcgacaccgcttttaaatggggtattgttgctcaaccacaaaacttcttcttcaccggccggttgccaggagagcaggtgagcgccctgcagggcgacggaagcttttacctgcgggtggtcaacgacgataagttcaagatcgtccagcttgcggcgggagaatgcaggagaaagttgttcaatcaccgggagagcaaaaattttattaatcattacgccatcctctttcgggcaaaaaaaagagcgaccgaagccgctcttattgattacttattcatctcaacttatttggagatgtgagcaatcaggtccagaactttgttggagtaaccagtttcgttgtcgtaccaggaaaccagtttcacgaagttgtcgttcagtgcgataccagctttagcatcgaacacggaagtgcaaacttcgccgttgaaatcggtagatacaacgtcgtcttcggtgtaacccagaacgcctttcattgcgccttcagaagccgctttgattgctttcttgatttcttcgtaggacgctgctttttccagacgaacggtcaggtcaacaacggatacgttcggagtcggaacgcggaacgccataccggtcagtttgccgttcagttctggcagtactttacctaccgctttagcagcgccggtagaggacgggatgatgttctgcgctgcgccgcggccgccgcgccagtctttgtgagacgggccatcaacggttttctgagttgcggtggtagcgtgaactgtggtcatcaggccttcaacgataccgaagttgtcgttgatgactttagccagcggagccaggcagttggtggtgcaggatgcgttagaaacgatgtcctggcctgcgtaagtgtcgaagttagcgccgcgaacgaacatcggagtgttgtctttggacgggccagtcagaacgacttttttcgcgccagcggtgatgtgtttacgagcggtttcgtcggtcaggaagataccggttgcttcagcaacaacgtcaacaccaacttcatcccatttcaggttagccgggtcacgttcagcggtaacacggatttttttaccgttaacgaccagatgaccgtctttcacttcaacggtaccgtcgaaacgaccgtgagtggagtcatacttcagcatgtaagccatgtactctgcgtctaacaggtcgttgattgcaacgatctcgatgtcagaacgtttctgagcagcacggaaaacaatgcgaccgatacggccaaaaccgttgatacctactttgatagtcatatattccaccagctatttgttagtgaataaaaggttgcctgtaaaattacaaaaaccttacgcagcgtcaagcggaatcgtgtcaatcattgcgacaaatcaatcctgagcagacctttgcgcgattgatttgcctcactctccctttgagcccaattccatatggggactgcgtccggaattttaaaggtcatataagataaaaatgtgattagtatcacaattatctggctgcctgatggcatcggataagtttagaacaaaagtacaggtttcattgttaatgttttgttagaatcgacgggtaaagttgccctttcaaagcgagaagtaatcacatggctaataaaccatctcctgacgagctcaaacaagaattgagcgagatgcagttttatgtgacgcagaatcacggtaccgaaccgccgtttaccggacggttgctgcataacaaaaaagacggcatctaccactgcctggtctgcgatgcgccgctatttcactcacaatccaagtatgactccggctgcggctggccaagcttctatgagccggtgagtgacgacgcgattcgttatctcaatgattactcccacgggatgcagcgtactgaaattcgctgtggcaattgcgatgcgcatctggggcatgtcttcccggatggcccgcagccgaccggcgagcgtttttgcgtcaattcggcctctttaagcttcaccgatgagcaaaacggcgagcgaactaaaggctaagaaacgattcagcaaattattccaagacggatgagcagaagatggatatcgagcaaattattgccagcatgacgccggaactgtaccaacgtttagccaccgcggtggagttaggaaaatggccggacggcgttgcgctgaccccggaacaaaaagaaaacagcatgcagctggtgatgttgtggcaggcgcgcaacaacacggatgcgcagcatatgaccatcgacaccaacggtcagatggtgatgaagagcaaacagcaattgaaagaggatttcggtatcgtgccgaagccgattgcgacgttcaaaccgcagtaacctgccgcacagagcgcccggtttagccgggctgctctccatgttaccccggtcgcgcagtgcttccggggtgtgtgttttactgcgtcttgatacctagcgactcggccagttgtcgggcaagctggtttttgtcatctgcgccatattcccagaacatgccgcccgctaaccctttgctcttgatgtaatcggctttgatcgccaccgaacgtggattctcgtaggagagggcgaaaagcgctttgccatcggcagagtttaccgataaccacggcaccttcgcttcgtcatcccagtgctcagtaaagcgtttctgcggatcgttgagcagtttggcaacaatatcgttgtatttcacataggtatctttgctcaggtcataacccagcgatttaaacaactcgatttgctgcgccccgaagtaaggttgggtagccgggtttttctgcgcgtctggcttactccagtcaatccctggctcgacggcacgtttcggtacccggccatagaaaccaatgccgagattcatctggctgggtttgaggccagcagccagatagttattcaccacaaaatcggcgctgtatttatccgctgcggcgacggtcggccagtggcgggagtcatacagatttgagttgaaatattgtgtgccgtaggccatgtcgtaggtcatcagattgatatagtccagcagtggggcgaccgctttcacgtcgacccagctttttggactttcaacattggcgcccacggcgatggtcaccagtttcttagtgccaacggcggcacgtagttctttcagcaacgcggtaaagttatcgcgatccgccggctggctggccaccaatccccaggcgccgttaaccggaaactcccagtcaagatcgatgccatcaaggccatattggtcaatgacctgctgaaccgaacggataaacaccgcccggctttccggcgtggccgccgcgccggaaaatccacgcgcgccccagccgccaacggagagcaggactttcagatcgggattctgctgacgtaacgccggcagtttttgtaaatccgcctgtacttttggcgacagccagatttgatggagatgctcaggatctttcagcgcctcgttggtctcgtctttttcatcgttgtagataagcccgaacgagtagttaaggtgggttatttgtcggacatccagcttgtcgatatcgccgccggggcctgcggtgacgtcgccgccgccgttgaagtagccgaccgacatgaaagattgcgcggaaacgacagaggcgcagagcaggggtaatgctgccagcaagggcaaaagtttcatcggagttcctctttgacaataaaaaaaaatgcacacgccacggaaatggcgtggcgaaaaaacagcctgtctacagtatcagcccttatccgaggaaactgcgagacagctcaatttatcgaggtcaacgaggcggtaaatagcgcccggcgtgaggtgcgccgggcgtgaggtcagggctgggtttccagccagtcgtcgagggtgtagagcgtagctccggcggcggccatttccataaaggcaacggcgctgtcctgcggctgcaggttgacgccgcgacagccgtcggtgatcacgttgacggtgtagcccaaatccagcgcatcaagcacggtaaacttaacgcagtaatccgtcgcgagaccgagaatgttcagctccgtcacgccgtgcgcgcgcagccagccatcgagttcggttttctgccggtgaccgttgtcgaaaaaagcgctgtagctgtcgattaccggattttgccctttatgaaacacggcgttaatagcctgctgtttgagtagcgggtgcagcgcggcgccatcgctatgctgcacgcagtgatcgggccagaaagtctgcggcaggccatcaagctcgccctgggcatagggttccgcctgatgctgactggcaaagctaccatggttggccggatgccagtcctggcttgcgatgatggcgtcgccgcgcgccaggctccagtcgatcagctgatttgcgatatcaatggtgctgtcgccttcggggacggcgagtgcgccgccagcgcagaaatcgttttgcaggtctaccaatagcagcgcgcggtggctcatagcatgttccttattcatcaggggtcagctcgccgcgcaggttttgctgcatggcgtttcgaatggccgcaccatcaaggttctgactgagcagatagtgtagcttggtcagcgtcgcttccacggtcatatcaaaaccgctaatgactccggcctgcgccagcgcgttgccggtggcatagccgcccatattcaccttacccgacatgcattgcgtcaggttcaccaccacaataccgcgctggctggcttccgccaggacctgaataaactcgccgttctgcggcgcattgcctacgccataggagcgcaggatcagcgctttcaccggctgacgcaggaaattacgcaccacatcggcagaaatcccaggatagatagtgaccacgccgataggctgcggcgtaatggggtggacgatcagctcgccctttccgtgcggcgcgggcggggtaccgagacggcggatatggatgccggcttccagcagcggcgccaggtttggcgaagcaaaggcatcgaaaccgtctgcgtgggccttggtcgtgcggttgccgcgatacagacgattattgaagaatagcgaaacttcattgatcgggtagttggcggcgacatacagcgcattgagcaaattgatttgcccatcggaacgcagctcggctagcgggatttgtgaccctgtcacaatgaccggcttacctaaattctccagcatgaacgacagcgccgaagcggtgaaggccatggtgtcggtgccgtgcaggataacaaagccatcgtattggtcgtagtggtcgcgaatatcgtcagcgatatgctgccagtcttccggcgtcatatcagacgaatccatcaacggcgcatattcatgaatagtaaagtccggcatctccgggcggtggaactcgggcatcagcgccagctgacgctgcaggtggccggaaacggggatataaccgtgatcggagcgctgcataccgatggtcccaccggtgtaggcaacgtaaatcgatttcttttgcatagcatcgcttaggttggacgtgaacaggcgcagtataaagtggcaggcaaaaaaataaagcgctaaccctgggagttgcagagaagcgcttgaatttaatgtcgttgaaacgctgccccacgggggggcagacgggggattaacgaatattggcgcaggtcagacagaaggcatagcgattctgcggatcgttaaatgccgccagtttatcgctttccgttttcacaacgtccgcggctgccgcaaccggcgcaggcaggtatgcttgaatcgcggccggcagagccgcgcgcactgaaccggtcaggctatccatcaccatcgcgaagaacgtgggttcttcctggtaccaggtgatatgccactgtttcagtttcgccagctccgcggctttcgccaccgcatcgtcgaaatcgccgaggctatctaccagaccattggccttggcgtcttcaccggtccagacgtggccttgcgcgatttggtcaatcttctccggcgtgctcttacgcgcgttagccaccagggtgataaagcgcttatagccgttttcgatgctcagctgtattaactgctgcacttccggcggcagcgatttggtggttgagacatcggccagtggcgaggtggcgacgccatcggtatggactccaattgaaccgagcgtattttccaccgtgttaatcacgccaaagataccgatggagccggtaagggtgctcgggttcgccacgatgtaatccgcaggggtggagatccagtaaccgccggatgccgccatgccgcccattgagaccaccaccggtttacccgccgctttcgccgccgccagttcttcgcggatgacctccgaggcgctgacgctgccgccaggactgttgacgcgcagaacgatcgcttttactttcggatccaggcgcgcgtcgcggatttgcgccgcggtggtgtcgccgccgacgttacccggcgtttcttcaccatccatgatggcaccgttcgcaaagataaccgctaccgctgaaccctgttcagcaggcgctttgacgttgtaatcgtagtagctgatggcgcgatagttgttatccgctttgctccagccaaactgcttagtcagcgctttttccacttccgtcgaggtggccagctcgtcgactagcttgttatccagagcgtatttcgcggtatcgccatcaactttacgcaggccgtcgatcaccccctgagcgccggggaacagctgctgcgcggtgatctggcggttagcggcaatggtgttgagatagttctgccacagttcgccgatccaacggctgtccgcttcacgcgcagccggcgacatgtcgtcgcgaataaatggctcgacggcggatttgtaagtaccgacgcggaaaacgtgggtcgagacttttagtttatccagcagcgacttgtaatacaggccgttggtggcaaagccgtgcaggtcgacttcaccctgcggcgagagccaaattttattggcgaagctcgccaggtagtattgcccctgggtgtagctgctgccgacggcatataccggtttaccgctgtcgcggaactcgcgtagcgctttaccgatgtactgcatcgaaggctgatcgccgccgacgaagtttttcagatccagtacgataccggtgatattacggtcgtctttcgcctggcgaatcgtctgtacgatatcgaacagtgagttctcctgcagacgatcggaactggcgccgaacagctggcggccgatgaccccgagcttgctgctggcggaaggcttatcaacgaccacgccggtgatgtccatcagcagcgcgccgcgtgcggtatgttccgcggtgctgctgctaaactgtgcccagatgccgacgcaaatcagcactaacaccaggaacaccaggttcagcgcgaattggcgaatgaaattgagtattcgccatgtccatttaaaaaatccggcaagaaatcgccaaagggttcgcatgtattctccctaatattttgatgatgggtcagccgcaggggctgccgcgtctggctatcctaaagagagtgccgacgcttgtcagcaggaatcacccatcgggctgtaacaaaatccatgcgcatgttaattttatgcaaaatgacatcacaggagttacacagatggatgctctcgaactactggtaaatcgccgcagcgcgtcgcgcctgaccgatccggctccggctggcgaacagctggaaaatatccttcacgcggggatgcgcgcgccggatcacggcacgttacaaccgtggcggttctttattattgccgatgatggccgcgaacgctttagccaactgctggaaaaaggggcgatggccgccgggcaggatgaaaaagccattgaaaaagcacgtaatgcgccgttccgtgcgccgttgattatcgcggtagtcgcacgctgcgaagaacatccgaaggtaccgctgtgggaacaggagatgtccgcgggatgtgcggtgatggcgatgcaaatggccgcagtggcgcagggctataacggtatctggcgtagcggcgcgttaaccgagagtccggttgtccgcgaaggctttggctgccgcgaacaggacaaaattgtcggtttcctctacctcggcacgccgcagttaaaagcatcaaccacgtttacgcgtccggataccgcgccgttcgtcacgcgcttctgagtcagtgcttgttacgccggtggcgctgccgcttaccggggctacagcgctgtgcgatttagtagcccggagaaggcgcgttaagcgccgcctccgggagttcaacggcgatgacgttacttctgcgttttggcgaattcatcctttgctttctgcaactgctgttggaaggccgggttggtatgcagggtcgccaccaccgccgagccgactatccgcgccgcatcgacgtcgctctgccaatgatagccgcagataacccggctttcgcccaactcatagccgcgtttgagaatttcgttttgccgctgcggattgatctccgccagtaccagtgcggttgcccaaccgatagaggtatggccggaagggtaagatccgtttttcgacagcttgtcctgctcggtagtgttacaggttgaaacgccgtagaacgcaaacgggcgaatgcgcatatatttctctttcgcgctgcgggtggccagatcgccggcatcctcaatcatatttgtcagcagcttatgtaactgcggcgcgtcttgttcggtgataggcgaaccaaaagcgctggagaaggcattcgcgacgccgccggcgctcaggttagcatcttcagccgccagcttgccgcgttcggtattgcgcagcagccgtcctttctcatacatcgcctgatcgtttaaaaatgcgatgctgccaacttccggtggcggcggcaacagcgccaggctatcgatggcctgcgcatttttcagataatagagatccggtttggtggtcgcatcattgccggcagggaccagcgcgaaagcgttaacggaaaacaggctggcgaggcagagggcgagaacgcgctttttcatctacatttccttacggtgttatatatccagaacaatggttttgtttttagtcacatttttgtcatctgtaagtaaaagttaaaatggcgttgaaaaaattgttcggtatcgcaaaaacgcatatttgtctgcttaatgagcaaccactcgcgatttcggactgtcgcacttatcaccttgccgtttgggcgctaccatagcgggattgcaatgacaggagatgtccatgagcgagcaagctattcgtttaacgcaatacagccacggagccggttgcggttgtaaaatttcccctaaagtgctggaaaccattctgcatagcgagcaggcgaagtttgtcgacccgaacctgcttgtcggcaacgaaaccagcgacgatgcggcggtctacgatctgggtaacgggacgtcgatcatcagcaccaccgattttttcatgccgatcgtcgataacccttttgattttggccgtatcgcggcgactaacgccatcagcgacattttcgccatgggcggcaaaccgattatggcgattgcgatacttggctggccaatcaacacgctggcgccggagattgctcgcgaagtggttgaaggcgggcgttttgcctgccagcaggccgggattgcgctggcgggcggtcactccatcgatgcgccggaaccgattttcgggctcgcggtgaccggcgtggtaccaaccgaacgtatcaagaaaaacagcaccgcgcaggcgggctgcaagctgtatctgaccaaaccactgggtattggcgtgctgactaccgccgagaagaaatcgttgctgaagccggaacatcaggggctggcgacggaaaccatgtgccagatgaaccttgccggcgccgcgtttgccaatatcgaaggggtaaaagcgatgaccgacgtcaccggtttcggcttgctggggcatctcagcgaagtctgccgcggcgcgggcgttcaggcgcaactaaactacgccgatatccctaaactcccgggcgttgaagcttacattgccgccggagcggtgccgggcggcaccggacgcaactttgccagctacggtcatttgatgggcgagatgccgccggcatggcgagatctgctgtgcgatccgcaaacttccggcggcctgctgctggcggtcacgccggaagccgaagccgaagtccaggccgctgccgcggaatttggcattaagcttgccgccattggcgagctggtcaccgcccgcggcgggcgtccaatgatcgagatccgttgattagatgcggttgtttattgcagaaaaaccgagtctcggtcgcgctatcgccgatgtgttgccgaaaccgcatcgcaaaggcgatggctttattgagtgcggcaacgggcaggtggtcacctggtgtatcggccacctgctggagcaggcgcagccggatgtttacgacggacgctatgcgcgctggaacctgctcgatctacccatcgttccagaaaagtggcaactgcaaccaaaaccgtcggtcacgaaacagctgaacgtcatcaagcgcctgcttggcgaggcgcaggaagtggttcacgcgggcgacccggatagagaagggcaactgctggtcgatgaggtgctggactacctgcagctggcgccggaaaagcgccaacaggtgcagcgttgcctcattaacgacctcaacccacaggcggttgagcgggcgattaaccgcctgcgcgcgaatagcgagtttgtcccgctgtgcgtgtcggcgctggcccgcgctcgcgccgactggctgtatggcatcaacatgacccgcgcctacaccattctcgggcgtaatgccggctatcagggagtgttgtcggttggtcgcgtacagacgccggtgttggggctggtggtgcgtcgcgatgaagagatcgagaacttcgtcgccaaagatttctttgacgtcaaagcgcatattgtcacgccgcaagacgagcggtttatcgccacctgggtgccgagcgaagcctgcgaaccctatcaggatgaagaggggcgtttactgcatcgcccgctggccgagcatgtggttaaacgcattgaaggccagccggcaatcgtgaccggttataacgataagcgcgattccgaaccggcgccgctaccgttttcgctgtcggcgttacagatcgaagcggccaaacgtttcggcttcagcgcccagaacgtgctggatatctgccagaagctgtatgagacccacaaactgattacctatccgcgctcggatagccgctacctgcctgaggaacattttgccggccgccatgcggtactgaatgcgattagcgtccatgcgccggatctgctgccgcagccggtgatggatccggagatccgcaaccgctgttgggatgataaaaaggtcgatgcgcaccacgccattatcccgaccgcgcgcagcagtcaggtcaaactcaacgataacgaagagaaggtatacaacctgatcgctcgtcagtatctgatgcagttctgcccggatgcggtgttccgcaagtgccagattgacctggatattgctaacggcaaatttgtcgccaaggcgcgcttcctcgccgaagcgggctggcgcgcgctgcttggtaacaaagagcgcgacgaagagaacgacggtacgccgctgccggtggtcgccaaaggcgatgagctattgtgcgaaaaaggtgaggtggtggagcgacaaacccagccgccgcgccactttaccgacgcgacgttactgtcggcgatgaccggtattgcccgctttgtgcaggataaagaactgaaaaagatcctccgcgcaaccgacggtctggggacggaagcgacccgcgccgggattattgagctgctgtttaagcgcggtttcctgaataaaaaggggcgctatatccactcatcggatgccggtcgggcgctaatccattctctgccggaaatggccgcgcgcccggatatgaccgcccactgggaatcggtattgacgcaaatcagcgaaaaacagtgccgctatcaggactttatgcagccgctggtggggacgctgttccagcttatcgatcaggcgcggagcacgccggtgcgccagttccgcgggctggtcgcgccaggcggagcgaaaaagtcgtttagtaaagggaaaggcaagccgaaagggaaaaagccggcggcggacatcgcgccggaaagtccgcaataattttcttcgcccctcgccacgaggggcttagctaaaacgcacttccgcctgagggcgctaaacccggatgagggttttcccacatatcatttccgcctccctgctctaaaatagggttattgatgttaaagaagggataaaaaggaaaagatgatgagcgaacaaatcagtaaacaaccgcaagttgaccacgctgaagagaatgcttttttcccttcagcctactcccttagtcagtttaccagcccagtgtccgatctcagcggcgctgattatgcatcagggtatcgcgggcggcggaaagtgctggttatcgccgccgatgaacgttacctgcctaccgataacggcacgctcttttcgaccggtaatcatccggtagagacgctgctgccgatgtaccatctgcacgccgcaggtttcgattttgatattgcgacgctctccgggcaaatggtcaagttcgaatactgggcgatgccgcgcgaagaccaaaagattatgccgttcttcgagcgttatctgccgcagttccgccagccgctggcgctttcagatgttgtggggcaactgggggctgatagcgactatgcggcggtatttattcccggcggccacggtgcgcttatcggcctgccggagagcgaagccgtcgccgaaacgctgcgctgggcgctgcggcacgatcggtttgtgatttcgctctgtcacggcccggcggcgtttctcgcattacgtcatggggagaatccgttaaacggttatgccatttgcgcgtttccggatgccgccgataaacaaacgccggatatcggctatatgcccggtcacctgacctggtattttggcgaagcgctgaaagcgatggggctggaaatcgtaaacagcgatattaaaggtcgtgtgcatcaggatcgtaaagtgctgaccggggacagtccttttgcggcaaatgcgctcggtcaactggcggcaaaagcgttgctcgacgaatatgcaaagtaacagcaatctgatgagggggagcagtgaaatatatctcaattagtcacccgggcggcccggaggttcttcagattggtgaaggcgacatcccttcggttggtgataacgacgtcctgatccaggtgaaagccgctggcgtcaatcggccggatatcttacagcggcagggcgtttatccgatgccggaaggagtaacgccgatacccgggctggaagtcgctggactggttgtggcggtaggagcgcaggtgacggattttcatcccggcgataaggtttgcgccctgaccaacggcggcggctatgcggagtattgcgcggtaccggcggggcaaacgttgccaataccgcctgggctgagttttagcgaagcggcggcgatacctgaaactttctttaccgtgtgggccaacctgtttcagatgggcagggcgcaacctcatgaaagcgtgctgattcacggcggggccagcggcatcgggacaacggcgatcctgctgtgtcatgagttaggtatgaaagtctataccaccgttgggcaggaagaaaaagtggcggcgctgcgtccttatgccacggctatcaattacaaaaccgatgatttcgctgagaaaatcaatcagctgaccgatggtaaaggcgtcgacgttattctcgatatcgtgggtggcccctattttaatcgtaatctggaactgctgaagcgagatgggcggctggtgattatcggctttatgggcgggcgaatcgcccatgatgttgatattcaaaccttgatgctcaagcgcgcgaccgtgaccggttcaacgatgcgcggacgaagcgcggaagaaaaaaggcagatcgctcaggcgctacagcgccatgtctggccgctgctgtcgcagggtaaatgtaaaccgctgatttacgccagctatccgatggctgaaatcgcgcaggcgcatgcctgcctcgatagcggtaatcacctggggaaagtggtgattaccatggattagcgttgatatccccgacgccgggcgtcggggataaagacatagattaaatcacaccctgcgccagcatggcgtcagcgaccttgacgaagccggcgatattggcgccgcggacatagttggtctgcttctcttcaccgccgtattcgacgcaggcgtggtgaatatccaacatgatgtgatgcaaacgcgcatccactttctccgctttccagcccatacgcgcggcgttctgcgccatttcaaggccggatgtggcgacgccgccggcgttggcagctttgcccggcgcgaacagcacgccagcatcgaggaacagatcggtggcggcaatggtggtgggcatgttggcgccttcggcaaccgctttaacgccattggcgatcagcatttgcgcggcatcgacatccagttcgttctgggtcgcgcacggcagcgcgatatctaccggcactgaccacggctgctggccttcgaggtaggtgagaccgaattcgcgcgcgtagtcggctacgcgaccgtggctgcgctctttaatatcgatcaggcgggccagtttctctttggtgaagccggcttcgtctaccaccgtaccgttggagtcggaggcggtaatgacgcgcgcgccgaattccatggctttctcaatggcgaactgcgccacgttgccggagccggataccgcgacgcgcatcccttcgaagctcagaccgtggcgcttgagcatcgcttctgtaaagtaaaccagaccgtaaccggtagcctccgggcggatgagactgccgccgaaggagagacctttgccggtgaagacgcaggcgctattgttggaaagcttgcgcatcatgccggccataaagccgacttcgcggccgccaacgccgatgtcgcccgccggaacgtcggtgtccgggccgaggtgacgatacagttccgtcatcaaggcctggcagaagcgcatcacttcgccgtcgcttttacctttcgggtcgaaatcgctgccgcctttaccgccgcccatcggcagcgtggtgagggcgtttttgaaggtctgttcgaagcccaggaacttaaggatcgacaggttgaccgacgggtggaagcgcatgccgcctttgtatgggccaatcgcggagttgaactgcacgcgccaggcgcggttaacctgcacctgattgcgatcgtcaacccagacgacgcggaactggatgacgcgctccggttcgaccaggcgttccagcaaattgagctgacgatagcgcggattctgttcaaggaacggccacagagtggtcatcacttcgcggacggcttgggcgaattcagtttgatgcgggtcgcgctgttgaacgcgggcgagaaaactttccagagtacacgcctgatccatagatgtaatttccccttacggttgtggttgcttgttattttttatacacggccttgaaaaagccgattttccgactataacaccggaaatagttaggctgacaaggaaaaattgagcgcggagaaaaatttataatccgacaagggtcataactaaaaacgatgacccaggccgaagatgggaggagaaactaacctgcctgttgagcgataaaggcattcagcagaggaatatccgccggcgccagatcaaattctaatgcttgcgacggcgtacaccagcgcagttcgctatggtaatgagcgaccggttcaccgctaaactcgccaatccaccaggcatgcaggtggatcaaacgtccggagacttcccgttgatggctggcgatatagcgggttggcctcgcaacgatagccaactcctcttccagttcgcgcgctaacgcctgcggctggctttcgccatgttcgactttgccgccggcgaactcccacagcccaggctgatcggcatgcggcgggcgctgcgccagcaggattttaccgtcgcgttcgataatcgcggcgacaacatcaatgattttttgcatagttgtcctgaatcattcaaataccggccttgcttataatggcgtattatctccgtctttcccctgtaccgacaaccttttagcctgatggagcgtcaccgtgcttgatagccgcctgcatccccgattgaagcccgtcctgaatgccatcgcccgcgggctcgatcgtccggggatctcccctgacggcctgacgcttttcggttttgctatcggcgtgctggcgctgccgtttctggcgctcggctggtacggcgccgcgctggcggccattgtgctgaaccggttgctggatggcctggatggcgcgctggcgcggcggcgtggtctcagcgacgccggcggatttctggatatctcgctcgattttttgttttacgcgctggtgccgttcggttttattgttgccgacccggcgcaaaatgcgctggcgggcggctggctgctgtttgcgtttatcggcaccggcagcagtttcctggcgtttgcgacactcgcggcaaagcatcaaattgccaatccgggctatgcgcataaatcattttattatcttggcgggttgactgaaggaacggagacaatcctgctatttgtgctgtgttgcctgtttccggcgcacttcacctggctggcgtggtgtttcggcgcgttatgctggctgacgaccttcacccgtatctggagcggctacctgacgctgagggaggcgcaaagccacaacctccctcagtaggcggattatttgctgctgtccgggccgcgttcgccggtggctaccggattttgcggattaccgctccattcgtaccagccgccgtcgtaaacggagacgtttttccagcccatcgctctggcgtacatgaaggtctctgaggctcgccagcctgtgccacagtaaaacgagacctgctggttgggcagaatgttccactgtttccacatcgccgcgatatcgtcggcgctgcgcatcgtgccgtccggattatggaagtcttccatatgggtggaatcgctgccggcatggccccagcgggcgccggcaatatcgcccttcggcttgatgtagctgtagccgctggtggtgccgataaattccggccacgaacggacgctgaccagcgacgcatcctggcggtgtagtaacccacgcgcctgttcggtattgagcattaactgcggctgaccggggatcggcgcgccgaaatccgtcaccgttttttctttcgctggcatgccgcgctcgaccggcagattcgcgtcggaccagcttttccaaccgccgtcgagcaggcggacatctttcaccccggcatacagcatgatctgcgcgacgcgcgcggcggcgtagacgtcgcgaccgtacagaatcaccgtggtgtcatggcgaatactgtgtttagccagcatcgcttttagctgttcatcggacactttgttccacagcggctcgctttccacttcattggtatcgatataaccggcgccgggaatgtgattcagcagataaaatttcggcgcgccccaggccacttcaaacagtttccagtcgccctgcggggcggcggtaacggttttaccttgctgtaaatcgtggatccactgcggatacaccagctgctcaaagtgcggcagcttctgcaggcgctcgccctgactgaaagcgtcgctaagggtgctgagtttggtgaatccggcttctttcaagcgcgccgcaaccctggcgttatcgtcagcgccgccatataacgcgattggcgtatcggcctgcaggcggtgctgagtagcccaggcacgcagttgttcgtcgctcattgcgccaagccaggtagcggagaggtttagcgcctgcggttcatggccctgtgggccgttggcgctttgcggccaaccgttatagaaagcgctgaggcgggtatctatcgctacgccgtgctgctgttgcagcgttgaaaagtccagcgttggcatggtatcagcggcgaaagtagaggaagcagcaagccccatgagcagggcgagtgcggtcaattgagaaacacgtttcatcgaaatgcccgacggtagaaagaggagggctcattctctgctcctgataagggaatttctttgcgataacgcaggttaggcggaatttgcctgccaggcggcaatattaatacagcgtccgcccggtgggagatcctggctgtcgtgagtcaccaggaccgccgggattgccagccggtcaatttccgcaaacacccactggcgaaaatcggcgcgaagttctgcatccaggcgattaaaaggctcatccagcagcagcgcttgcggcctcgccagcagggcgcgcagcaggctgacgcgcgcgcgctgtccgccggagagcgtggccggatcgcgcgaggcgaaccccggcatgccggcgcgcgccagcgcttgctcaacttcgctctggcgcgccgcgccgcggatctcagcgggcagggcgagctgtaaattgtgccccacgctgaagtggtcaaacagtagcgcatcctgaaacaggatgccaatgcgtcgcgcttcagtggcgagcccgtcgcagcggcgtttgttgagccataattcaccttcggcgcgaaaggtgtcggcaagcgccccgatcatccaggcgaaaagggttgatttaccgcagccggaagggcccatcaaggtcaatacttcgccgggggcgacagaaaaatttaccccacacaacagcggttggcggtggagggttaatgtcagattgtgaacggttagcattagcgtaatccccggcggcgacggcctatacaccaggctatcagcgcagtaaccataaagcagatcgccggtagcagcaattgccacagcgcttgtgcggcaagccgcgtactgtcgccgccgctgctcagcgcgaccgcttcgctggtcaacgtcggcgtccgtccgccgccgagccacacggtcggcagatattgcgcgatactcaccgaaaacccgaccgccagcgcggtaagcagcggtcgcgccattgacggcagtttgacccaccagaacaggcggccgcgccgccagccaagcgtacgggcaatcaagagcaaccgtggatccagattgcgccacgccggggagaggataaacagcatccatggcacgacccataacagatgcccccataataccgtcatcaattgaccgtcgaaccagcccacgagcgctaattgatattgaccatcggctagcggcagcgttgggatgattaatggcagccagagtccgttatatctggcgggaccgaactccagccacagcaggcatagcgcggcccccagtatcgccgcgcctaacgccagccagaggctgttgccgatcgcctcagccgttggctgcgtccattgtgaaatgccagccaacaacaacgcgcaaaccagaccgcaggcgggtaccgcctgcgccaggatatgtccggtcgctgcgttggcaggggcggctcgtttgccgcatagtgctggaatagtttgccgccagcggcgccagcctaccgatgcgatggccgcgaagattaacgtgaacgccagcagcagcaggctggccagcgcgcctttcgcctgttgcagcggatcgcccagattaagccactgccacgccaggaccgccagcgttggcggatttcccggaccgatcaccaaagcgacatccaccgccgacaaactccaggcgacggtggccagcagaacaaggctcatcgatggcagcagtgccggcacaataatccactgcagacattgccagcggttgtagccgaaggttttcatcactacgctttgggctgccagctgtttttcacccagtacgccatacgccacccacagtaaaaaagcgctctctttaaccgccatcgtcaggcccagcccgataccgtagcgatcgaccggtgggctcaatgcgggaaacagacgatacagccagccgccttcggcaaatagcagcaaggcggcggtggcgaaggcgacatggggtaccgccagcagcagcggtaatcttctcgccaggcgctgccagccagtagctggccataatgcgccaatcaccatcagggtgatgaacagcgcgccgcccaccgccagcagcgtagagactagcgtcgccgccagcgcctgcggcaactgcggatcgctaaatagcgcccgccaggccgcggcgtcgacggcaggtatcgccatcagcgcggcggcgggaagcagggggaggtagataagcgctatcgctccccacgtcagcgcaattagtgggtaccgtagcggcgcaaccattcctgctccagcgcgtcaacccaggcggcgtgcggttcagccagcattggcggcgtcgctttcggttgcacggcgtaaaatgcggcgcgctgggcgtcgttgagtttttcgggatcgagtacgctgggatcgccccagatttgcggatcggctttgcgtagctgagcctgcggcgacagcaggaagttagccaccacctgtgcgcccgccgtcgcgcgggcgttggcggggatagcgacaaaatgcacgttgccgagcatcccttgtttaaaaccgaagctataactgtctggcggaagttcgccgctggcggctttttgctgcgcatgcagcggattgaaggtcagcgatagttgtagcgtgccttgcgccagcatcgcgtccatccgcgccggcgacagcggaaaatcgcggccctggcgccagagcagcgggtgtagcctgtcgagataggcccaaagcggcgcggtcaccgcggcgaaacttgtctcctgcggcggctggcgcagggcctccggccgatcggtcaacgcaaccagcaactgctcaaggaaagcggtgccggtaaaatccggcggccgcggataggtgacgctgcctggatgtgctgtggcgaaagccagtagcgcctgtgcgctgtccggtggttgagccagctgcgatcggcgggcgataaaagtcagctgcgcgctgccccacggggattccgcgccgtcggtggcgagggagaaatcttcccgaaccggttttcgcgtatcgacgtagcgccagttaggcagcttctcggcccagtcgctgcgcagtaaattcgcctgcttcaacgtgcggaaattctcgccattaatccacaataaatcgattgaaccgccgcgggaacgcccggcacgcgcctcggtctgaatacgcttgaccgcatcggcggcatcggcgatatgtacaatacgcagatcgacggcgtaatcccgtttcacctcggcgctgacccagtcgaggtaacggttaaccgccgggtcgccgccccaggcgttgaaccacaccgtctggccgcgcgcctgctggctgatgctttgccagttctcgtcggcgttggcgagagtcggggccagcagcagtgcggcaagccaaattaaacaataacgcagactgcgcatattgactccttagggatgagtgtcggaaacatcgggcttcgggatttggcacaggccttgcgccgggatcgccagcgcagaattaaagcgtgcggataaattttgcaggccgatcagcgcggttagttcggttaacgcctgagcatcgaactgctgcgccagccgggcgcgcagtgcatcatcgacggcgggcggcgtcatgctcgccgcttcggcatattccagcgccaaccgttcgctatcgctgaataatccgctattgcgccagtcgttaaccgccaatagtttttcgctgccgccggcgcgctgcgccagtttcatgctggtgatatcaatgcaaaattcacagtgacacagctgggcgatacgggcgctcaccaacgagcgtagcagcggatcgagcggcgagcgtcggcgttccagatatccgacaaacatggagaccagataaaacgccagcgggatgcgcccccaccagcggatagggctgagcaccgcgccataatggcgacggtgtagccacgcctgcgggcgcaggatcaatggaatcgacgttaacggcggtagattcatggcgatttcctgttgtgatgcgcaacgtattgcgctttgactatcgcgactacgatagctaaagcgaacaaaatagataaaccgctgagcagccagaacagcccccccgtcagcaggcttccggcccacgagtagacgatagtcgccggtaattggccgacgccggtggcaaacataaaatggcgaaagcggattgaggttagcccagcggcgtaactcaccggatcgaaagggacgaagggcagcaggcggcaaaccaggatggtgtgcttgccgtagcgcctaaaaaaaccatctacgctctgtaataccgccttgccggttagtttttctaccacttcacggcccagtacgcgggcaataaaaaagcacaacgccgcgccagccatcgcgctgacccatgacaatacgccgccccacagtgcgccgaacagcgaagcgttggcaaaggtaattaaaaatgccggcagcggcgcgacaatcgcctgcaggatcatcagcccgaaagagaccagggctgccagcggaccataagcgtgaataaaacgctccagcgcttgctgatcgagggtggcaaacgcgctgaagctatgttgcacaaaggagcgtacgcccggtattaaccaccagccgacgagcgctgccagtgccagcaggatgatagcgccgcgtaagagccacagccgttttctgttatccatttttatcgcttaccgcggatgttgcgacactaatgcgtttatagcggccataacgtctggcggcctgagttaatacaaagagcatcaggccggcaatgctgagtttgccaataaaagccagggtgatgccatcgcgggccagttcgctagccataaaagtataaataaacaatcccggtagggtggcgatggtggagataaacgtaaaggaccagaaggggatcgccgtcagcccataggcataattctgcagattataagggaacagcggcaccagcctggtgaaaatcagaaaatcgaagccgctgcgggcaataccgcgctcgaaagcctgaaaaacggcgtggtgaccgcaatagcgctgcagcgcttcgcggcccagccagcgggccagcaggaacgacagcgatgaggcgacagtcgcggcgataagcgagagtagcgtgcccaaccaggggccgaatatcataccgccgacgatgactaacgcgctgcctggcatcagacataaggtggcgatgataaacagcaggatataaagcgcataacctgcgctaccgctgtgcagaataagcaattgaagatcgtgaaggtggctgaacagtctcgtcagcccggcgtgctgaacaagccatgccagcagggcaaacaggagtacggcaaacagcagtttatagcgtgtcgggtaacggcttcttttgcatgagggtctcctgtcttcgttttgtccggcaggaaacgccgggtgcgcgcgacagtatagtaaattgccgcgagcgacaatgtataccgttcactttattgattttgctcaggatagcggggctccgcgccggagccccaaagaagagttatggtttaaaggttgcccataccggcgcatgatcggaaggcttttccatcccgcggatgtcgtaatcgatgccggtttcgacgcagcgctgagccagcggcgagcttgccagcagcaggtcgatacgcagaccgcgattgtcatcgaaacctttagagcggtaatcgaaccatgagaagcggtcatgattatccgggttggcgtgacgccaggtatcgaccaggccccagcccagcaggcgatccatccattcacgctcttccggcaggaaggaacatttaccggtgcgcagccagcgcttacggttctcttcgccaatgccgatatcaaggtcggtagggctaatgttcatatcgcccatgataagcaccggattttctttgttcagctcggtatcgaggtagttctgcagattctgataaaacgccgctttcgccggaaatttagtctcgtggtcacggctctctccttgcgggaaatagccgttaattaccgtgacattaccaaacggcgagggaatttccgccatgatgatgcggcgttgcgcatcttcgccgtcgcccgggaagccgcgacgcacggctatcggagtctctttggtcagcagcgcgacgccgtaatggcctttttgcccatggtaaaagacgttgtaacccagctttgccacctcttcgagaggaaacatatcgtcgtgtactttggtttcctggaggccgataacatcgggctgatgtttatcgacgatggcggccagttgatgggggcgggcacgcaggccgttgatattaaaagagatgaatttcatagtcgctgccactgtgcaaggtgaatagtgcaaggatgttagcagaatttcatcatggtggctgccgacaggtggttaattctaccgattactgcggttggcgagcgaatcgcacaaattatgcaccgttttggcgcatgtcgcgccaaaaaagcgcagatatctacgataaatttcgtagaggatcacaattacagaattatatcttatcgctgcataacttctcgtcgttttcctctatccagcgccgtttatttgatgattattcactaattatgcatttttattgaatagttagtatctgtaactcattgatatcgcgtgattgagctcaatttatgcatttttgcctctggctggcacgatgcgtgcaatctacatttacagcgtaataactcataaattttaacattgtgcttacttttaatttaccggaagaggtcgatatgtctcagtcaattacgcgtagcaattttgatcaatggatgatgccggtatatgcgccggcggcttttattccggtacgcggcgaaggttcacggttgtgggatcagcaggggaaagagtatatcgattttgccggcggtatcgcggtgaatgcgctgggacacgctaatccacagctagtaaaagcgctgaccgagcaggcgggaaaattctggcataccggtaacggctataccaacgaaccggcgctgcgccttgccaaaaagcttatcgacgccacctttgccgaccgcgttttcttttgtaactccggcgccgaagccaacgaagcggcgctgaaactggcgcgtaaatacgcccacgatcattacggcagccacaaaagcggcattgtcgcgttcaaaaacgccttccacggacgcacgttgttcaccgtatctgcaggtggccaaccttcctattcgcaggattttgcgccgctgccgccgcagatccaacatgctacctataacgacctcgactcggcgcgggcgctgattaatgacgacacctgcgcggtgatcgtcgagccgatgcagggcgagggcggcgtggtgccggcgaaagcggaatttttgcgcggcctgcgtgaactgtgcgatcagcacaacgcgctactgatttttgatgaggttcaaactggcgtcggtcgtaccggcgaattgtatgcctatatgcactacggggtgacgccggatgtcctgtcgacggcgaaagcgctgggcggcggcttcccgatcggcgcgctgttggcgacggaaaaatgcgccagcgtgatgaccgtcggcacccatggcacgacctacggcggtaacccactcgccaccgctgttgccggggagttactgtctatcgtcaataccccgacgcttttgaacggcgttaaacagcgtcaccagtggtttagcgaacgcctgagcgcgattaacgccaaatacggcctgttcaaggaaattcgcggactggggctgctgattggctgtgtactgaacgacgaatatgccgggaaagctaaagccattagtacccaggcggcggaagacgggctgatggtactgattgccggggcaaacgtcgttcgcttcgctccggcccttaacgtgagcgaggaagaggtgaacaccggtctcgatcgctttgagctggcctgccgtcacttccttgcgggagtttcatcatgatggtgatccgaccggttgaaaaagccgatttgccggggctgatggccctggcgggagaaaccggcggcggcctgacgtcgctgccggcggacgaacccacgttggctgcccgcattgaacgctcccagcggacctggcgcggcgaactgcctaaaagcgagcagggctatgtctttgtgctggaagatagcgtcagcggcgcggtcgttgggatctgcgcgattgaagtcgccgttgggctcaacgatccctggtacaactatcgggtcggcacgcaggtacatgcatcaaaagagctcaacgtttatcacgcgctgccgacgctgttccttagcaacgatcacaccggctgtagcgaactctgcacgctgtttctcgatccggcatggcgtaaagagggtaacggctacctgttgtcgaaatcgcgactgctgtttatggccggtttccgcgaccgctttaatgacaaagtggttgccgagatgcgcggcgtgattgatgagcatggctattcgccgttctgggaaagcctcggcaagcgcttcttcgcgattgaattttcccgcgccgactatctctccggcaccggtaaaaaagcgtttatcgccgcactaatgccaaaacatccgttatatatcgactttctctccgatgaagcgcgggcggtcatcggccaggttcatccgcaaacggcgcctgcgcgtgcggtactggaaaaagaaggcttccgttttaacaactacatcgacattttcgacggcggcccgacgctggagtgcgaaatcgaccgggtgcgggcgatacgcaaaagccgcctgctgacggtggaagaagggcagcctgcgcctggagagtggccgcagtgtctggtcaccaacgagcagtatcagcagttccgcgccatcctggtccatgccgacccggatagcgaaacgttgctgctgagcgcgcgtgagctggatacgctgaaatgccatccaggcgaccgcgtacggatggtccgcctgatcccggaggagaaagcatcatgagtttatggattaacggcgaatggcaaagcgggcgtggcccgcagcgcagtaaatataacccggtcaaccaggcgctgctgtggcagggaaatgacgccgacgccgggcaggtcgcgcaggcggttagcgccgcgcgtcaggcttttcccgcctgggcccgcctgccatttagcgcgcgtcaggggatcgtcgagaagtttgcggcgctgctggaagcgaacaaaagccagctgacggcgattattgccgctgagaccggtaaaccacgctgggaggcggccacggaaattaccgccatgataaataaggtggcgatctcggtgcgcgcttaccatagccgcaccggcgagagcgagacggcgatggccgacggcgccgccacgttgcgccaccgtccccacggggtgctggcggtgttcgggccgtataacttcccgggccatttacctaacggacacatcgtaccggcgctactcgccggtaataccatcgtctttaaacccagcgagcttacgccgcaaagtggcgaagcggtggttaaactgtgggctgaggcgggcttacccgctggagtcgtgaatctactgcagggcggccgggagaccggcgaggcgctgagcgggcaggcggatatcgacggtctcttgttcaccggcagtttcgcgaccggcttccaactgcatcgtcagctggccgggcagccgcaaaaaatcctcgcccttgaaatgggcggcaataacccgctgattgttgacgagccgcaggatattgacgcagcggttcacctgactatccagtcggcatttatcaccgccgggcagcgttgtacctgcgcgcgccgcctgttggttaagcgcggcacggcgggcgacgcgtttttgcagcgtttagtgacggtgtcacaacgtcttattcccggcgagtgggatgcgcagccgcagccgttcctgggcgggctggtatcgccgcaggccgcgcaaaaggtgcatcaggcctggcttgggcacgtggcgagcggcggacagacgttactggagccgcgtctgttgcgcgacggcacttcgctgctgacgccggggatcatcgacatgagcaacgtgcagcaggtggcggatgaagaagtctttggcccgctgttgtgcgtgtggcgctatgacgatttcgcgcaagcgatcgcgatggctaacgccacccgttttggtctctcctgcggattgatttcctccgagcgcgataagttcgagcgcctgttgctggaagcccgcgccgggatagtcaactggaacaagccgctgaccggcgccgccagtaccgcgccgtttggcggaaccggcgcctcgggaaatcatcgtccaggcgcctggtacgccgccgattattgcgcctggccgatggccagcctggaatctgccgaactggcgctaccggagacgctcagtccgggtctggatttttcattgcaggcaagttgatgaaagttcgcggggccgggattctcggccctgcgagttttcctcgatccgtttcagtaatagaggaggcgtcgtggacgactttctggcactaactctggcggggcgctggccgcatcattttcatggcgaaaccgcccattttcgttggcactggatcgattgcggcatcctgctgctgaccccgcatgcgcgctgcgaacgttcactggtactctcctgcggtattcacggcaatgaaaccgcgccggtggagatagtcaacgctttgcttcagcagttgtttagcggcgaactcccgctgcgctggcgtgtgttggtgatattcggcaacccgccggcgctgcggcaaaataaacgctatctcgatagcgatatgaaccgcatgttcggcgaacgctggcgcaagttcgcgcccagtggggaaacggtgcgggcgcggcagttggaaagcgctgtgacgcgtttctttagcgatagccatggcgtgcgctggcatctggatatgcataccgctattcgcggctcgctgcatccgcgctttggggtgttgccggcacgcgaggagccgtggagcgaagattttctcagctggcttggcgcggccgggctggaggcgctggtgttccatcaacaaccggcgggaacctttacccactttagttgcgaacgttttgccgcgctggcctgtacgctggagttgggcaaagcgctgccttttggcgacaacgatttaacccagttctcagcgacgcagcgggcgttaagcaggctgttggtgggcgatttggcggtggaagaagcgactgcgccgctgcgctaccgggtggtgcagcagatcacgcgccacagtgaccagttccagttgcatatgtcgggggagacgctcaattttacgccgttcagcgccgggacgctgctggcggaggatggcgaaacgcgctatgtcgtcgaaaaggcgcaagagtacgtgctgtttcccaaccccggcgtggcgccagggctacgggctgggctgatgctggagcggttgtaatttcctttcttaactattcacagccgttgtcgttcgcggttgtgaatatcgagtgaaatatcactgcgcgccgatcttatttatttgtgccattgatatggtttgcagattattcctggttaaatgctttgtttttaatctccactgttttataatcttcacagtttccttataaaacagcctgttatttattttttgttgcatatccctcctcattttccttattttctccacaattggtgagaaaatgttttttacactttcattgttttacgcttgcactgactaattgacgataaagcgcgtaaagttaatctcgtcaacacggcaatgcgccgtcagaataactgatagtaaggacataaccatgaagaagattactgctctgtttgttgcctctacgctggctctgggtgctgctaacctggctcacgcagccgatactaccgctaccacccaaaccgacagcaaaccgatgatgcaccataaaggtatgccgggtcatcacgatatgatgttcaaagacctgaacctgaccgatgcgcaaaagcagcaggttcgcgacatcatgaaaagccaacgccagaacatgaaacgtccgtcccttgacgaacgtcgcgccatgcacgatctgatcgccagcgatactttcgacaaagcgaaagccagcgcgcagattgataagatggaagcacagcataaagagatgatgctttcccgcatggaaacccagaacaagatttacaacatcctgacgccagaacagaaaaaacagttcaatgcgaattttgagaagcatctgacagaacgtaaagcgccggaaggtaaaatgcctgcacctgctgagtaactcagcgcgcggaatgaagaccgccggtcttgcccaatcattgccattaaggctttgggcagggccggcggttttttacgtttgccatatcattagccaagaaggtgcagcggatactcaccgctgagcaatggcttacaaagaatcttgtagccatcgtgatcgaaaccggcaggcaatgtggtgagttcagcggcttgcgccagtgaatctaccgcgcccagccacagccagttatgaatgatatggtactgaaccatatccgggccgcgctcttccagcgccaccggacccgcccacggccagcataccagctgaagcttactcatttgcgccagcagccgctggttatgatcttcgacgctctctttaccacagcaggcgccggcgcagcgccccagtgcggaacgaaaacaggcgcgcccgcgactcagcggctccagccccagaatgccataacacagacggtgctcatcggcgatggtttgtagcgcctgtaatgccgcgcggcggttagcgaacaggccgtacaggtgctgctgatgggagaaatcgacttctcgcgcatacacaacttgcggtttacccgactccagcagccaggagcagagctgtttattacgccgcagtcgtttattaaacagcggctgctgttctttaattaaccgcgcttcaagtaacagcgcgcctaattcaccggcggtgcgttgccaactgatgcgtcgcgcctggcgcaacatggaggcctcatctgcggtacgcaaatgcgacagcacacggctgcggatattcacgctcttaccgatataaagcggcagcgtctcgctttcaccatggaactgatacaccccaggcagctttggcagggcctccagccatgggcgcaaatgttcgggatactcatagattgccgccgcttcaaactccagacgcggggcagattgttttctggccacaacaactcctgatactgttcatgcatccagtatagcaggcgagttttgcggcgaaaaggacaaaaaataaccccggcgctggccggggtgtcgggaagccgttacttcttccagaaatcgtcgaagacggtgattggcgggcggcgcttatgctcggttttcagataccagccttcgatggttttggcgatgttctcatccagcgttttgccttccagatagtcatcaatattttcgtaggttacgcccagcgcgacttcatccggcagagaaggacggtcatcttcgaggtcggcggtcggctgcttcatataaaggtgctcaggacagcccagctgagccagtagctgtttgccctgacgtttattgagacggaagatcgggttaatgtcggtaccgccatcgccgtatttggtaaagaagccggtgatcgcttctgcggcatggtctgttcccacgaccacgcctttggtcatgccggcgatactgtattgcgctttcattcgctcacgggctttctcgttgccgcgaacaaagtcgctcagctcaatacccgcttcacgcaacgcctgctcgctggccagcaccgcgcctttgatattgacggtcagcacacggtcaggctggataaattcgatggcatcctggcaatcctgctcatcggcctggatgccataaggcaggcgtacggcgataaattgcaggctccgatcgccgctttcagcccgcagctcatcgatcgccatctggcatagtttgccggtaagggtggaatcctggccgccgctaatgccgagcaccagtgatttaatgaacggataggtctgcagataggatttcaggaaatccacgctgcgtcgaatttcgccttcgacatcaatctgcggcttcgcgcccagcgcctggataatttgttgttgaagcgtcattacgccctccggaaagtgagcctgtatggcaaccagcatggtctaaaactacctctttgctgccgaaacgacaaggctggtaccgctgactgacggaaaagaaggcaaccaatggcatagcatttatttatggtacgggaaaacatcggtagtggagtacgttccgtcgctgattttttgctcacatctggttaccagaaaagttctgaatttacatgaattcgacgtttggcttgaaaaataacgctttttattccaggcttaaaacacgccgattacataatgaggacggaatatgaacaaaaaattagcaggattgatgggcgcagcagcagtattaaccatgctggcagggtgtacggcctatgaccgcaccaaagaccagttcacacagccagttgttaaggatgtcaaaaaaggcatgacccgcagccaggttatgcagattgccggtaaaccgtcgtctgaagtcaccatgatccacgcgcgcggaacctgccagacttatatcctgggtcaacgggatggtaaaattgaaacctactttgtcgcgctggacgagaccggccacgtgatgaactccggctaccagacctgcgccgagtacgacaccgatccgcgtaacaacaaataactacgcgtcacaagctgagagctacgaaagcccgaccattggtcgggcttttttatggcggctaatgcttatttaattgcgcgaattatttgggggaaatgtgagggtagtcaaaacgcgaggtcaatgagagacaattctgttcaacagggaattatcctgccgccaaatgttgccgtatactcaatgcataaacaaaactaaccgaaagttaccagtcttaccggctctcagccattgctgaagcccaggtcctacacattgaggaagcgttcatggaaaagaaacatatctatctgttctgctcggctggcatgtccacttcattactggtctccaaaatgcgcgcccaggcggaaaagtatgaagtcccggtaattattgaagcgtatcctgaaacgctggccggtgaaaaagggccggaagctgatgtcgtattattagggccacaaattgcgtatatgctgccggaaatccaacgtttgctgccgaacaagccggtagaggtcattgattccattctgtacggtaaagttgatggcttaggtgtattgaaagcggccgtcgcggccattaagaaagctgctgcacaataattttattttttaaactcgcgatattctggcgtctggtagttaattaatactagccgccactatattcaacagtttattttcccgtcaaagagtaatttcatacatcatcgccgtaatattttattgcggcttttaagggtattgactatgagtaaagtgatcgattcgcttgaaaaggtactccttccttttgcagttaaaataggaaagcaaccgcacattaatgcgattaaaaacggctttattaaattaatgccgctgaccctcgccggggccatgttcgtattaatcaacaacgtttttctgagctttggtgaaggttctttcttttattcaatggggattcgcctggatgcctccaccattgaaaccttaaacggctttaaagccatcggcggtaatgtttacaacggtacgttgggcattatgtcgctgatggcgccgttctttatcggcgccgcgctggccgaagagcgtaaagtcgaccctatggcagctggtctgctggcggtcgccgcctttatgaccgtcacgccttatagcgtgggtgaagcctatgccgtcggcgccaactggctcggcgggcagaacatcatctccgggatgattatcggcctggtggtggcggaactgttcacctttgtcattcgccgcaactgggtcatcaaactgccggatagcgtgccgtcatcggtatcgcgctccttctcggcgctgatcccgggcttcctgattttgtcggtcttcggcattatttcgtggattttgtcaaactacggcagcaacttccatcagatcatcatggactccatctccacgccgctggcggcgatgggcagcgtcgttggctgggcgtacgttatctttaactccctgctgtggttcttcggggtgcacggttcgctggcgctgacggcgctggataacggcattatgacgccgtgggcgctggaaaacatcgcgctgtataaccagtatggctctgtcgacgcggccattgaagccggcaaacagttccacttctgggcgaagccgatgctcgactcctacatcctgctgggtggttccggtgcgacgctgggtctgattatcgccatcttcatcgcttctcgccgcgccgatcatcgtcaggtggctaaactggcgctgccgtcaggcatcttccagattaacgaaccgattctgttcggcctgccgatcatcatgaacccggtcatgttcatcccgttcgtgctggtacaaccgattctggccgcgattacgctggccgcatacagcctgggcattatcccaccggtgaccaacctggcgccgtggacgatgccaaccggtttgggggccttctttaacagtaatggtagcgttgctgccctgttggtcgcgctcttcaacctttgtgtcgctactgccgtgtacctgccgttcgtcatcctgtcgaacaaagcgcagagcaccatcgagcaggaagaaagcgaagaagatattgctaacgcactgaaattctgatgtcgagcggtacgggctctccccgtaccgcctgagaaacgagggaaatattatgtttgatctggataacatcgacgcggtagaaaccccggaaaatgacctcgaagaggtggtgatggggctgattatcaactccggacaggcgcgtagcctggcctatgcggctctgaagcaggcgaagcagggagattttgccgccgcgaaatcgatgatggagcaatcgcggatggcgctgagtgaagcgcatcgcgtccagacccagcttattgaaagcgatgaaggcgagggcaagatgaaggtgagtctggtgctggttcatgcgcaggatcatctgatgacctcaatgctggcccgtgaactggtggccgaattgatcgagctgcacgagaaggtacaataggctatccgaacgatgaggcagccgaaaatgatgaccacagagatcagtaccgccagggaacaacagctcttcaacgggaaaaactttcatgtggtcatctataacaaaacggagagcgtgagcgggcttcaccagcatgattactacgagttcactatcgttttaaccgggcgctattatcaggaaattaatggcaaacgggtgctgctggagcgcggggattttgtctttatcccaatggggtcgcaccatcagagcttttatgaatttggtgcgacgcgcattcttaacgttggcatcagcagacgcttctttgagaaacattatctgccgctgctgccgttcgggctggtcgcctctcaggtctatgcggtgcaaagcgcctttctcagctatatcgagtcggttattgcttcactgaattttcgcgagactgaatttgacgaatttattgaactggtctcgttttacaccattaaccgcttacgtcattatcgtgaagagcccgttgaagatgtgatccctcactggctgaaaaataccgtagaggatatgcacgataaaaataaatttggcgaaagcgcgctggaaaatatggtgcaattgtccgggaaaacgcaagaatatttaacccgggcgacccagcgctattatggtaagacgccgatgcagatcattaatgatatccgcatcaatttcgcgaaaaaacagctggaaatcaccaactattcggtcactgatattgcgtatgaatcaggatatagcagcccaagtctgtttattaaaacgttcaaaaggctgacctcatttacgccaagcagttatcgcaaacaactgaccaatattaattaactcgcagcggtatttaccgcgcggtttattcattcaagttaactgtccgcatttatgcggagagcggtctacgtctacgcgtagcgcctaagggagaaagatatgagccagaaattaaaagtcgtgactatcggcggcggcagcagctataccccggaattactggaaggtttcctcaaacgctatcatgagctgccggtaacggaactgtggctggtggacgtggaagaggggcaggaaaagctcgatatcatccatgcactgtgccagcggatggtggaaaaagccggcgtgccgatgaaagtctacaaaactctcgatcgccgcgcggcgctggaaggggcggatttcgtcaccacgcaactgcgcgttggccagctgaaagcgcgtgaaaaagatgaacgtatcccgctaagccatggctatcttggccaggaaaccaacggtgcgggcggtctgtttaaaggtctgcgtaccatcccggtgattttcgatatcgtcaaagatgtgcaggaaatttgccccgatgcgtggatcattaactttaccaaccctgcgggtatggtcaccgaggcggtataccgccataccaatttcaaacgctttatcggcgtgtgcaacattccaatcggtatgaagatgtttattaccgatgtgctgcaactgagtccgagcgatgagttgaatatcgatctgttcggtctcaaccacctggtgttcgttcgcgatgtgctggtcaatggcgtgtcgcgcttcgatgaactgctggacggcgtggcttctggccgtctgaccgcgaactcggtgaaaaatatcttcgacctgccgtttagcgaagggctgattcgctcactgcgcctgatcccatgctcatatctgctttattacttcaagccgaaagagatgctggcgattgagatgggcgagtactacaaaggcggcgcgcgcgctcaggtcgtacagaaggttgaaaagcagctgttcgaactgtacaaaaatccggatctgaacattaagccgaaggagcttgagcagcgcggcggcgcttactactctgatgccgcctgcgaggtgattaacgccatctacaatgataaacaggccgagcactatgtgaatattccgcaccatggccatgttgataatattccggccgactgggcggtagaaatgacctgcacgctgggccgcgacggcgcgaagcccacgccgcgaatcacgcattttgatgaaaaagtgttggggctgatttataccatcaaaggctttgaagtggcggccagccaggcggcaatgagcggtgagctcaatgatgtgctgctggcgctcaatttaagcccgctgattcattcagatcgtgatgccgagcagttggcgcgggagatgatcctcgcccatgagaagtggctgccgaactttgcagcgactatcgaaaaactgaaacagtaacgggagcggccgatggaacgcgtattgatcgttaacgccgatgattatggcctgagcaaagggcagaattacggcattatcgaagcctgcaagaatggactggtgacatcgactacggcgttggtcaacggcgcggctatcggccacgccgcccaattaagccgtagcctgcctgagctggcggtgggcatgcactttgtgttgacactgggcgagccattatcggcgatgccggggttaacccgcgacgggcggttgggcaaatggatttggcagatggcggaagaggacagcctgccgctggatgagatcgcccacgaactggagtgtcagtaccggcgttttatcgaactgtttggttgcgaaccaacgcatatcgacagccaccaccatgtgcatatgatcgcgcagatctatcccattgtcgccgcctttgcgcgcgaaaagggcgtcgctttgcgtatcgatcgtcaggtggcggcgctgaatggcctcgaccagggtgcggcgcgcagtagcgatggcttcagcagcgaattttacggtgaagcggtttcacaagcgctgttcctgcagacgctggatgcgtcgattgaacggcaggaaaactcgctggaagtgatgtgtcatccggcatttgtcgataacaccattatgtgcagcgcttactgctatccgcggctgaccgaactggacgtgctgacgtccggcgaactgaagtacgctattgcggaacgtggctaccggctcggaaactatcgcgacgtataaagagaggaaagcccggcagccataactgccgggctttttgttacgcgggtatggccgcaactttactgcttcttgaccagacgcgatgcgcggccagtagcgtcagcagtttatcgacgctaagcgtgttaatcgcgtcgcattcgataaccccttcttcacccgtagcgggcacctgtagcagcgaactaaactgccgcgcatcgcccgccagtaaaatgggcttcagatgcttataggcttccagcagataatagcgggcatcgccgttatcgctgatgctgctcagatcgccgccgggaacgataaccgcatcaaccgtcaacgacggcgagccggcgaaggttccggcgatcggtagctgcgatccatcatcggcgctgacttcgcccatacgcgaatagagcagtttgctgtgaacgcctctggcctgtagcgcctgtagcaggttgagtacatcctgcgcgcaggtcttctcgttgagtaataccgcgacaattcgtccttttacgtcgccatcgccatcggcgtaaaggctgagggtcgggtctttctccacgccgttaaccggcgcaggcggcgctatgttacgctgctcatcgctcagttcgataccgagattgttggctaccgcttccgccagcccgatatcaatatgcgccagatgatcgaccacccgctcgcggatccagactctgaccactttgctcagctcaaaactaaagccgccgataatgtgctgctgctcaatcggcgtctggctgagccagaacaggcgaggatgggcgtagtactcgccaaacgagggactacggttacggattttctcgccatcaacgcgttccgccagcgattcaaagccgccgcgtttcggcgccggcggcgtttcacggggccagttatcgttgatagagttgggctcatagtttgccggattggtatcaatctccattcggtgcatgccgtcacgctggaaattatgatacgggcaggtagggcggttaattggaatttcgtggaaatttggcccgccgaggcggctaatttgcgtatcagtataggagaagagtcgcccttgtaacagcggatcgttactaaaatcgatacccggcacaatatgacccggatggaatgccgcctgttcgttctcagcgaagaagttgtcggggttacggttaagcaccattttgccgactcgttgaacgggcaccagcgcttccggaatgagcttggtcggatccagcagatcgaagtcaaaattgaactcgttttcctccggaattaactgcaggccgagctcgaattccggataatcgccagcctcgatggcttcccacagatcgcggcgatggaagtccggatcgcggcctgttaatttctgcgcctcatcccataccagtgatgctttaccggccaccggcttccagtggaagcgcacaaaggtagccttcccttcggcattaatcaggcggaaggtatgaataccgaaaccttccatcgtgcgatagctgcgcggcaggccgcggtcggacatcgcccacatgacgttatgcagcgtttccggctgtagcgaaacataatcccagaaggtgtcatgggcgctttgtccctgcgggattgccaagtgcggttcgggtttcaccgcatgaacaaagtcgggaaatttaatcgcatcctggataaagaaaattggtgtgttgttgcccaccaggtcgaaaatgccctcttcggtatagaatttggtggcgaagccgcggatatcgcgcacggtatcggctgaacccgcgccgccctgaacggtggagaagcggacgaaaacaggggtgattttttccggcgcggacagaaaatcggctttggtaatctctttcaggcttttgtaaggctggaaatagccgtgcgcggcggaaccgcgagcatgaacgatacgctcgggaatgcgttcatggtcaaagtgggtaattttctcacgtaagataaaatcttccagcaacgttggcccgcggctgccggcgcgtaacgagttttgatcgtcggcgatgcgtaccccctgattggtggtcagcggaaagttttcaccgcctttacgctgtggctcgagggtatctaatttaatgctgtgggtatccggcgctttcaggctacccggcgccgtcggctcctcccctggcgcggttggctggggggtagggcgccattcacggtcttccggcgccagtgaatcgaggcccggttttgcttcatcgctatcgtgtaccggagcctgtcggctgtgtgggtcgtggtgcttatctgacatctgctcgtctcctgctttcattgctaaaagtggtcgttgctaaaccaaaacccttctaactatagaacattgtgctgaggatgctgctcaggcaggaatagagttatcctaaaatgcgcatcgtgccaggaggggcgacgaaaaggggggcaatcggctatgataggggtttatgttcccgctttgcttagtgaatccatctgttatgaaatcattgcgccaacaaaatcgccctatcattagctacgtgccgcgcgtcgagcctgcgccgccggatcatgccgttaaaatggaccattttcgcgatgtctggatattgcggggcaaatatgtcgcctttgtactgatgggcgagcgtttccgccgctcgccggcgttcaccgtgccggaatcggcgcagcgctgggctaatcagattcgccaggaaggtgaaatagaggcatgacctcataggaaaataaaaaagccgctgaaattcagcggcttttttgtggctattaacgttagcgatgcgccagttcagcgtcttcttcgctatcgaggatggctttatccgtctggcgcagccactggctggtcagcgtgccggcggtcattgaaccgttaacgttgagggcggtacggcccatatcaatcagcggctcgacggaaatcagcagtgcgaccagcgtgaccggcagacccatcgccggcagcacgatcaaggccgcgaaggtggcgccgccgccaacgccggctacgcccgcggagctcacggtgacgatacccacgagggtggcaatccacattggatccagcgggttgatgccaacggttggcgcgaccattaccgccagcattgccggatagataccggcgcagccgttctgaccaatcgtcgcgccgaatgaggcggagaagctggcaatggattccggtacgcccagacggcgcgtctgcgcttcaacgttcagcggaatagaagccgcgctggaacggctggtgaaggcgaaggtaatcaccggccagactttacggaaatacttcagcggactgacgccattgacggctaacagcagaccgtgcaccacaaacatgatgcccagcgcgatgtaagaagccactacgaaaccgccgagcttgatgatgtcgtgcaggttggaaccggcaaccactttggtcatcagcgccagcacgccgtacggagttaactgcatcaccagacgcaccagcttcatcacccagccctgcagcgtgtcgatggcggtcaggacgcgttggcctttctccacatcgtctttcagcagcttcagcgccgcgacgccaaggaacgccgagaagataacgatactgatgatcgaggtcgggttcgcgccggtcagatcggcaaacgggtttttcggcacaaacgacaggatcagctgcggaacgctcagatctgatactttaccgacatagttgctctggatggcgttcagacgggcggtttccgcgctgccctgcaccaggccttcagcggtgaggccaaacaggttggtcaccagtacgccgaccagcgcggcgataagggtggtgaacaacagcgtaccgatgctcaggaaactgattttacccagctgtgaggcattgtgcaggcgcgccaccgcgctcagaatagaggcgaagaccagcggcataacgatcatctgcagcagttgcacatagccgttaccgacgatattgaaccactgaatagaatctttcagaacctggctgtcggagccgtaaaccagctgcaggccgagaccaaagataacgccgataacgagaccgaccagtacttttttagcgaggctccactgtttgtggcgggtttgagccagcgcaaacagtaaaaccgcgaacacgacaacgttcgctattaatggaaaattcatccccgttctcctgatatcttgttacctgggttggtctgaaaccaactcttatggcgccaagagtagcagaaggccttattgctttcttatactcaaatggaatgggttataaccaaaaaatcatttagcgtatttatcgttcagcctgatggctaataaagcgattaaaggttatttgcagcgaattaatcatatttgatgaccagcgcacggcgctattttcggccatgctttgcggcatccagacggcgtaaatgaacagcgccatgcacagcgcgcgttctaattgattgcctttgcgcggcgcgaggatcggtaggcggaaccgccagcggcagggccacaacagcggtacgccggccggggtgagcatatcggcgagtatatgactgaggtagccgagcactaaaccctgcagcgcatcggccgggataatccagctatcaggcactttaagatagaacagcgccagcgcgccgaataccgccagcaggctgtgggtaaaaccgcgatggccgaaggcgcgggctaccggttttgagacccagcttaaacgctgcccgaggaaagatttcggatgatcgatatcgggcagcaggcaggtcagcacggcggaaggaacgatatgccaccagtccccctgcgccagcacgggggttaattctgcattttttgcaaataccgcacaggcgatagaaaagaagaggtggccttccgccgtcatgataaaaaccctaaactgtcaattcatacagtatagggtttttatacagtatacggaagaggtgacggtgtaactctttgtcacaaggttgacacattttgacgacgccaatgtcagcgcacgccgcttagccgcgcagatctgctaccgtcagctgctgcagagacgtcagtttcacatcggccagtacaaaacgcggatcgcggctgttttctgcttccggaaccacaattgagcgcattcgcgccgctttgctggcgatcatgccgttaacagaatcctccagcgccacgcaagacatcggcgcgatgccaagcttagcggcgcaatcgagatagacctgggggtgcggtttgctgtatggcagatgttcggcggaagccagcgcgtcaaactggtcgcgtagttcaaacatttccagcactttttccagcatatgcagcggcgacgccgaagcgagaccgatttttagtccctgggctttacacagcgccacggcttcacgcacgccgggcagcaacggccgcgactcctcgaccagttgaatggcgcggcggataatgctggcggttacctctgcgcggtccgggccgcgccagggctgttgcgcaaaccacaaatcgaccaccaggtcgatgcgcagccccagcaggtccggcaattcatcacggcggctaatatccactccgaggctgtccagtacctccagctctgcgcggtcccatagcggctctgaatcgataagcaggccatccatatcgaaaatagcggcaagaatctgacgcttcgctgacataagttcctctccattggcgtaagtagataacgaaattgtccatatggtatatcataccgcgctgaagcaggcgaaattcgctgacgaagatagacttatacctgactctatggcggcatggagagtctggcgttttaaacaaggggaactcatgacgtatcaacaagctggacgcattgcggtcattaaacgcattttgggatgggtcatcttcattccagccgtgctgtctacgctgatttccgtactgaaatttatgtacgagcatagcgaaaagaaaccgggtattgatgcggtgatgatggatttcgcccacctgatgattgagatggtgcgttttaatacgccgttcctgaatttcttctggtacaactcgccgctgccggagttcaaacatgcgttgaacatcggtttctggattatctacgcgctggtgtttgttggcatggcgttgcaggcttccggcgcgcggatgggccgccaggcgaagtttctacgcgaaggggtggaagatcagttgattctggaacaggctaaaggagcggaaggtctgtctcgtgaacagcttgccgaacgtattgtcgtaccgcgtcataccatcctgaagcagtattttacgctttacgtgctgccgattgtggtgattgtgattggctatgttttcttctcactgcttggcttcctgtaaatagacaaacggcccgggtaaccgggccatttatcattcggcaggcagcgctcgcggcttgccttcattgtctaccgccacataaataaacagggcttccgttgccttataacgctggcccagcggttccgtcgatacttttttcacccatacctcaatattaatggtgattgaggtgttaccgcgttttacgcagcgggcatagcagcacacgacatcgccaacggcgaccgggcgtaaaaaagtcataccatcaacacggacggtcacaacgcggccgcgggcaatctctttggccataatcgcgccgccgatatccatctgcgacatcagccagccgccaaaaatatcgccgttcgcgttggtatccgccggcatggccagggtgcgtaaaaccaattcgcccttcggggcgagatctgttgttgtcattctatactctgtactagtcaaagaagatcaggcgcgatgctactatgaaaacggcgcagagagaataggggaatacgcccgtcggtacggttaaaacggggttttggaaaaggtcgggacgcgagttgataaaagaaggcggtacgcgccggccagcgcgtaccgtagagagggattagtgcttatcgtcctgcggcatgtggcggtagatatagacgccgctcaacagggtaaagaccagggtcaatgccgttaaaccgaagactttgaagttgacccagatattttgcggcagccagaacgcgatgtagatattggccagcccgcagagaataaagaacagcgcccaggccagattcagccgtgaccacacctgctgcggcagcgtcagctctttgccaagcatgcgttggataagcggttttttcattacccactggctgaacagcagggcgccggcaaacagggcgtagatgacggtcactttccacttaatgaattcatcgttgtggaagaagatagtcagaccgccgaagacggcgaccagcacaaaagtgatcagcgccatcttttcaactttacgatagcgcacccagctataaatgaggaccaccgcggtggcgacgatcagcgcggtggttgcggcgtagatatcgtaaatcttataaaaagcgaagaagactacgagcggtaaaaaatcgagaaactgcttcatacatcaattccgtcgttcaggaagggccggaatacccggcccagattaaagttagttgcgaataagcatatacaagcggaacaaatagatcagcaacagcgcagagaacagattgctgatggtattaatgaccaccgcggcgacgtttggcgacagcgttgcgaagcttgaagcaagcagcagcagcgccgtttttgccagcagccagccgagtaccgctggcgccaccagacgcatattagcccacgccagacgcatactgccgcgcattgcgctaaagatgccgattttatcctgcaccagcatcaccggcgcgaacgccaggacaatcgccagcagcacgcccggcaccagcaccagcatcatccccatctgtaccacgaaggtggtgaacaggataagcagcaacagtttcggcagaaccggcgccgcggcgccgatcgcccgcagcgcgctgacgcgatgcccggcggagatcagctggatcagcaacagtacgccgccgacgaggatggcattccccaccaggccggagaaggttgaggctgccgacgcgcgcagcaagatctgctgctgttccggcgtcatgttctgcaccagctcaaacaagccggcgctgcccgccaggttatcgccttcgctgaggatcgataactgctcgtcactgggcgaaaaggcatggccaatgactaccgtgatgaacgcgcataacaacgcaatcagcagaatagtaacgaactgattacgaaaaaaattccccgtgtcacggtagacggacttcgccgtgatagacatgcattctccttgagtcttgcaggtgttttaactagccggggattgtaccgcaaaacgtggttgggtagcagtctctgccgctgtcacggtaagtatatctttgtaaagagttcccagcggcggcaggccgtagcgggcacgggcgcgatcgcacgcttcgttgagttcgccgccttcgcctgacatagcaaactcgcggcagggggaaggccgctgatgatagatggtgcagtgcaccgattcgccgatttcgccgcttaaggctgtgcagcggctttgccgctgattggtgccgctcatgcagcgcagaaaaggggtaaggggttcggtgagctgcgtaggtaccacgccgccggcgtcgtcggcttcagcccaatagaaggagactcgaaaatacgcacaacaggcaccgcacgtcatgcacgggttgatttcactcataattacacctgaaaaaaacgcatcaacacaaattgtcggcaattaaattagctatccgcacgatcggcgacaagagggggacgcaaaaatttttctcacgggtaaaaattgatgtaaggacaaatcagaacgttactgagtgctgcaaaaattaatctggatcaataaatgttaaatctaatggcctggtgtgatctaaaacagatcaaaactaactcattgtaggtatatttgctgccgctgataaaaaccataatggggacatggatatgaagaaaattgcagcggcggcattgatcttaggtacgctttctggtggtagcgcctgggcgcatgaagcgggggagttttttattcgcgcgggttcggcgacggttcgcccgactgagggttctgacaacgtactgggtagtctcggcggttttaacgtcagtaataacacccagttaggtttaacctttacctatatggcgaccgacaatatcggtatcgaactgctggcggcaacgccgttccgccacaaggtcggtaccgggccgaccggcaccatcgctaccgtacaccagttgccgccgacgctgatggcgcagtggtactttggcgatgcgcaaagcaaagtgcgcccgtatgtcggcgccggtattaactatacaaccttctttaacaatgatttcaacgataccggtaaggacgccgggctttccgacctgagcctgaaggattcatggggcgcggcaggacaggttggcctggattatctgattgaccgcaactggctgctgaacatgtcagtgtggtacatggatatcgacaccgacgtgaaattcaaagccaacggcgttaaccagaaagtcagtacccgtctggatccgtgggtgtttatgttctccgcgggctatcgattctaatggtttaaaaaaactggccgcttgcggccagttttatcctcttcagaccaaccgatgggcgtgcagtttggcgctttccataatgctatccattatcacctgcacgcgatgcggcaacacgcctcgttgacgataaatcaaccacgcctgcatattcacgccgcgttctcgtggcagacagggctgtagcgtacccgcttctaattccgccgcgacggagtaaaaaggggcatatacgatgcccaggccctgcttggcaagctcgatagccggcaaaatgttatcgcatacgctggaaccgttgacctctacctgaatactctcacccgcggcgttatagcaatgccaactgttgcggatcccgcccaacgtacgcaaagtgatgcagcggtgctgcgcaagctcatcaacatcgtgcagaggcgactgcacaatataatccgcgcaggcaaacagccccatgcgaaagcgagtgagtggccttgcgatcaggctttcgtcctgcggttggaaaaagctaatcagcagatcgcaatcgctatcgaaaagcgtcccgtgtttctgttcgcgctcgtcgggattgcgggtgagaatattgacggttaattccggcgccgaacgtagcaccggcggcaaaaggtatcgggcaaggaaagcctgaatgccgatcggcgcgccgagcgtcaccatgccgttgaggctgcgtttccaggtaccggacatatcaagcagatcattatgcttatccagcagaatatccgcccggcgcaggaactgctcgccaaactcgctcaggattaacgcccgtggatggcggataaagatctctaaccccaggcgccgttccagcgcattcagcgcccgcgacacattcgactgcggcatgtcaagtagttgggcggctttgctcacgcttgccgtttcggcaatcatgcgaacgatgcggagttcgtcaatgcgcaggtctttttctttcacaaggttggttcttttggtttgctatatcaaaaatgatatacatctttgccgtcattgtcatatgacttctggccagtagctgggtattatttgcgtggattatttattacagccgaaaaatacagagaaataattcgatgaaaataacaacaatggctgcgttatctgcaattttgctgctggcggcgtgcgcttccagcgtaaccgaaaaagaaaaacatattgaatatgacgatattatcaagggactatcggtttcggcggaagagatattattccggaaagataaaagtactgatttttaccgttatcaatatttggtctatcagtcggaaaatgattattctcggaacagctgcactattacagtgagtggcattgctaattataaaacagcgtagttagtacggtttaccttttttattaccaggtgttattatgtttctcgactacttcgccttaggcgtgttaattgccgtgtttttaattttattttacggcattattattattcatgatattccctatttattggccaagaaacgccagcatcctcaccaggatgcaattcatgtcgccggctgggtgagcctgtttaccctgcatgcgatttggccgctgttatggatctgggccacgctgtatcgccccgagcgcgggtggggaatggcgcataaaggcgaagataacgccgaaatgcatcagcgaatcaggcaacttgaaagcgagctcaagcgtctgcaggaacaacagataactgttacgacaaactcgtcaaataaccgctgaggccagtgtatggatttactcattattctttgctatgtggcgttggcctatggcgtatttaaaattttccgtatcccggtaaataaatggacggtgccaacggcagtccttggcggcgtgtttattgtcggcgcgctaattctgaccatgaattataatcacccgtataccgaccgcgcgcaaaaaatagcattgtcgatcccgattgtaccgcaggtgtcgggggccatcgtagaagttaccgataaaacgaatgtgttattacgcaaaggcgaggtgctgtttcgtcttgatgatagccgttatcgcgcgcgactgaataaactggaggcggatctcagtgccgccgaagcggatatcagaacccggaaagcggcattaagtgaatccgccgccaacgtccagcagatgacggcggaatatgaacgcgcccgtcaggattatcagcgctatgcgaaaggcgcagcgatgccggtaaatcctttttccgagcaggatgtgaatcacgccgagcagcaatatcaagcgcaatctgcggccctgcgggcggctaaagcccagtatcaacagcagttcgaaagactttcggcgcgtttcaatggcgaggatgcgcaaatcgccagcctgaaatcgcagattgccgaggcgcgttatgaccttgaacagacggtattccgcgcgcccagcgatggttatgtcactcaggtgctggcgcgtccgggaaccacggcagttcgtctgccgttcaaaccggtgatgatttttattccgcagcagaaacgccaggtggtggcggtatttcgccagaacgctatcctgcgcctggagcagggggacgaggcagaggttgtgtttaatggcttaccggggcaggtgtatgccggcaaggtcacaaaggtactgccaaccattcccgacggtagttaccaggcgagcggcgcattacagggtttaagcgccacgcccggtcgggaaggggtttatgtgatgattgacctggcggcgagccgcgatcttgcccatttaccggatggggtcagtgcccaggcggcggtgtataccgaccattttgcccacgtgtcggtgatgcgtaaggtgctgttacggatgaccagctggctgcattatctgtatctcgaccactaaaagctgaagttgagtcaaaaaaaagcccgcgataaacgcgggcaaaaatactggaagcaatgtgagcaatgtcgtaccgaatacctgagttgttcactcaactattcggtaatgagaaagataatatttctcatttaagatatcaaccccagagtttgtgcggaggcgcatttttttaatcaagggtgaaaaccgtgcgtttctggctgttatcacgcggccatgccgcagcgacatcgcggagcggcagcggcgtggtggcgatggtaaaatgaccgggaaccgccgcctgcagcatctccccggttgccgccagtagttgcggcatggtcaggctgccgatgccgctacccatgagctgtagcggcgcggcgcgaagcaccgcgccatttaacgcgatatccgccccggcaagggaacccacctgcacataacgtaccggcttatcgccaggggtgtatttcgccagcataggcagcagcaactctgcgctgcggccccacaaataatccacaaccacatctatttgcccggcgctggcggcggcaaactgcgcgtttagcgtctgctcatcggcggttaaatcaatacactcatcggctgcgagggcagccagcgcctgcgtattacgcccggtagcaatgattttttttgcgccgaggtagcgggcaatttgtactgccaactgcccggcgctgccggtggcgccgttaatcagtaccgtttctccggcctgaaactgcgcccgtttgacaagcgcagcccaggcagacatgcccggattggccatggccgcagcgctgatgtcatcaagtgcatccggcagcggcaggcaattctgcagcgcgaccggcgcgcgttgcgccatactgccgaacggcgcactggggaaagcaaaatagacgcgctgaccgtcagaggtcataccgacgccatcgataccgacgacaaacggcagcgtgccgtcaaaactataatgacgtcccgatgcccggcccttaactacgtggctaatagcggcggcgcgaacgtcgatcagcgtgtatccggctgcaggctgcggttcggtaaaatcggcccatatcggaccttcgttaagatcaaacaccacggcggctttcataacattatcccctgatgataattatgtgtaatatgcacatattcttcaggagcactatacgcggttaactaatatatgcaagatgcacataataattacgacatcaccgactttcacggcgcgctgttagacatcatcagcgtgatgaatcaaccgctgcgtgatgagcaaatattgcaggcggcaggggtacagcttgaacagatgctgtttccactactggtggcggtatggcgctatggcccggtgggggtagttgagctggcggatcatttaggccgcgattacaccaccgtcagccggcaggtgaaaaagctggaggctcagggccttgcctgcaagcaggccaatgccaaagaccggcggattagcgaggtgacgcttagcgaaaaggggcagcggatgatcgacgctattgccgttgcgcggcggcggttaatgaatcaggtgctggctggatggtcagaagatgaggtgctggcgctgtttcgcttaacgcgaaaatacgccaacagcctgcagcggaaatagccgcccggcgtgaggccgggcgacaaagggtcaggcggttttggtcgctgctttcaaactgtgcacgaaggtttttagctctgcgagcatgttttgcggctgctcaaggttacgctcgataatcttgacgatggccgagccggatattgccccggcggcaccggcgtcaatagcggccgaaacctgctccggcgccgagatgccaaagccctgcagcggcggcgcggcgttgtattccgccagtttttcaatcagatgatgcagcggcagcgcggcgcggttttccgcgcctgtcacgccagcgcgcgatagcaggtaggtatagccgcggccataggaggcaatctggcgcagtaaatcgtcatcggcatttggcgggcagatgaaaatcggcgcaatgttatggcgcagcgctgcctgacggaacggggcggactcttcgaccggcacgtcggcgaccagaaccgaatccacgccgacacgcgcgcattcggcgtagaactcatcaatgcccgggctgaacaccaggttcgcgtacatcaaaaggccgattgggattgtcggatgcttgtggcggatcgccgccagcatttcgaagcactgcgccggggtgacgccggcggcaaaagcgcgcaatgtggcaccctgaatcgtcgggccgtcggccagcgggtcggagaaggggatccccaattccagcgcatcggcgccggcttcaatcagcgcatcgatgattttcagcgactgctccggccccggatcgccaagggtgacgaagggaacaaaggcgccttcctggcggttttttaactgtgcaaatagcgtctcgtaacgttccatcagatttcccctcgcgctttcaaaatgtcgtgtacggtgaagatgtctttatcgccgcggccagacaggttaaccaccagcagctgctctttatccggattctcgcgcatcatcttcagcgcgtgcgccagagcgtgcgacgactccagcgccggaataatgccttcatggcgggagagcgctttaaaggcatccagcgcttcgttgtcggtaattgacacatactcggcgcgcccggtgctgttaaggaacgcatgctgcggacccactgacgggaaatccagcccggcggagatagaataagattcttcgatctgcccgtcggaagtttgcatcatcggcgacttcatgccgaaataaatgccgacgcgaccgtgcttcagcggtgcgccgtgctcgccggtttcgataccgtggccggcaggctcgacgccaatcaggccaacgcgggattcatcaatgaaatcagcgaacatgccgatggcgttagaaccaccgccaacgcaggcgatcaccgcgtccggcaggcgtccttctttctcaaggatctgcgctttggtttcttcgccgatcatgcgctggaattcacgcacgatagtcgggaatggatgcgggccagcggcagtgccgagcatgtagtgcgccttctcgtagctgccggaccagtcgcgcagcgcttcgttacaggcatctttcagggtggcggaaccgctgtgcactggaatgacctccgcacccatcaggcgcatgcggaagacgttcggcgactggcgctcgacgtctttggcgcccatatagatgcggcatttcagaccgagcagggcgctggccagcgccgaggcgacgccgtgttggccggcgccggtttcggcgataatttccgttttgcccatacgtttggcgagtagcgcctggcccagcacctggttggttttgtgcgcgccgccgtggagcagatcttcacgcttgaggtacagcgtggtgcgggtgccttcggtcagattgcggcatttggtcagcgccgtcggacgacccgcgtagtttttcagcaggtcggtgaattcagcctgaaattcaggatctttttgcgcgctgacgaaagcttcttccagctggcgcagggcgggcatcaggatctgcggaacgtacataccgccgaattcgccgaaatacgggttcagtaaagtgctcattattgcattgctccttaatatgcgcgcagcgtctggaaaacggcagccaccaggcttgcctcttttattcccggctgcgactctacgcctgagttgaaatcgagtccggcacagccgcttttcgcggcttctacgcagttatcggcgctaaggccgcctgccagcatcacgttacgcaggtcctggccctgcagcagcgaccagtcgaaacgttgtccgctcccgccctgaccgttgtcaaagacatatctggccacatggttcaggttacgcggcggcagcgtttcgcctacgctcagcgccctccagatttggatctgctccggcagcgccgcgcgcagggcatcaatccaggcctgatcttcgctcccatgaagctgtaccgcggcgagtttcaatttggtcgcgcgggtgacgacctcttcaatggctgcatcacggaacacgccaacgtaactaagcggcgcggcggccattaccgcctgtgcctgctggtcgttaacggcacgcggcgaactatcgacgaaaatcaggccgccgtagatggcgcccgcctcccaggcgacttgcgcatcctgcggacgagtcaggccgcagaccttgttctcacctaacagcacgcgcttcaccgcagcgctgaggtccggttgttccatcagcgccgagccaatcaggaagccgttggcgaagtggctaagctcgcggacttcgccataggtatggattccggattcgctgatcacggtgacatccgggccgagacgcggcgccaattgccgcgtgcggttcagatcaatcgacatatcgcgcagatcgcggttgttaatgccgacgactttggccttcagcgcaatcgcgcgctccagctcctcttcattgctgacctcggtcaggacgcccatattgagactgtgggcgacggcggcgagctggcgatattgatcgtcatcgagcaccgaaagcatcaacaggcaggcatcggcctggtagtaacgcgcgaggtaaatctggtaaggatcgatggtgaagtctttacacagaatcggctgcggcgcgactttgctgacgatcggcagaaaatcaaagctgccctgaaaatatttctcatcgcacagtaccgaaattgccgaggcgtagtgcttataaatcccggcgatggtcgccgggtcgaaatcttcccgaatcagtcccttcgacggcgacgcctttttgcactcgagaataaaagcggtgcgggcgccggccagcgcatcgtaaaaatggcgttcggacggcacgatgtcattctgaaaactggctaacggttgttgttgtttgcgggcttctacccaaatcgctttgtcggcaacgatttttgctaaaacggtctgcattatttaccctcttgccgctaatgcggtcactctgtcataggccgctccgctgtgcagcacatccagcacctgccgggcgttggctttcaggtcttcatgcccgtgtaaacgcatcaacatggcgacgttggcggcgacggcggcttcatgagcggcttcacctttaccttgtagcaagcgcgtgagaatgtcacggttttcttccggcgtgccgccggccagttgatcctgatgatatggcgtcaggccgaagtcggcggcggtcagctgatagctttggatttcgccgttattgagttcggcgaccacggtcggcgcatgcaacgagacttcgtccatgccgccgctgtgtaccacggcggcacgttgataaccgagtacgcgcaaggtttctgcaatcggcaacaccagttccgggctgtagacgccaatcaacgccagcggcgggtgcgccggattgataagcggccccaacacgttaaacaaggtgcgcgttttcaactgctggcggaccggcatcgcgtggcggaaaccggtgtggtatttcggcgcgaacaggaagcagacgcccagttcatccagcgcggcgcgcgatttatcggcattcatatccaggttgatgccaaacgcggccagcagatcggacgagccagatttactggagacgctgcggttaccgtgtttcgccacctttaaaccgcaggcggcggcgacaaaggcgctggcggttgagatattgatactgttgctgccatcgccgccggtaccgacgatatcggcaaactgataatccgggcgcgggaacggcgcggcgttttccagcagcgcggtagcggcgccggcaatttcctgtggttgttcgccgcgcactttcatgcttaccagcgcggcggccagctgttccggcttcacttcgccgcgcacgacggcggaaaacagcacgtggctctcctgctggctcagcgtctcggcctggtacagtttttccagaatcggctgtacgacattggtctgctccagtttctgcagcgcccatgccagcgtttgctccagcagtagcgctccctgggtagtcagaatcgactccggatggaactggaagccgcagacgcgatcggcgtcgtggcgaaccgccatcaccataccgttgaaattggcgttgatggtgagcccggccggaatattgctgccgacaagagaatggtagcgggccaccggcagcgggttggcgagaccggcgaacatcgcctggccgtcatgctcaatgcttgacgctttgccgtgaaggatttctcccgcctggccgacatagccgccgtaggcttccacgatggcctggtggccgaggcagataccgataatcggtaacttgccgcgcaggcgggtcagcagctcgggcatgcagccggcttcgcttggggttcccggccccggagagagcatcagcaccggattatccatggtgccgatacgttcaatcagcgattgcgccggtacggtattacgataaataaccacgttgtggccgttagcccgcagctggtcggcgaggttataggtaaaggagtcgatattatcgagcagcaggatgtcggccattagaaagtctccttcgcgtggtgggcctgagcaatggcgcgcagcacggcgcgagctttattacgggtttcatccgcctcggattgcggaacggaatcgagcacgataccggcgcccgcctgcacggtggcaatgccatcctcaacgtaggctgagcggatcacgatgcaggtatcgaggtcgccatgggcggtaaagtagccgaccgcgccgccgtagctaccgcgacgcttgccttccgcggcggcgattagctgcatggcgcgaactttcggcgcgccgctaagggtgcccatattcatgcaggcgcggtaggcgtgcaggacatcaaggtcgcggcgcagttcgccgaccacgcgggaaaccagatgcatcacaaaagagtagcgatcgactttggtcaaatccgctacgtagcggctacccggggtacagatgcgggccagatcgttacgggccaggtcaaccagcatcagatgttcagaaagctctttgtggtcggtacgcatctccagctcaatacggctatcgagatcgcgatccagtgaaccatcggcgcggcggccgcgaggacgggtgccggcaatggggtagatctcaatctggcggctgacggcgtcgtatttcagcgagctttccggcgatgcgccgaacagggtgaaatcgttatcctgcataaagaacatatacgggctgggattgctctttttcagcacatcgtacgaggccagcggcgacgggcaggggagggagaagcggcgcgacggcacgacctggaaaatttcgcccgcgcgaatggcgcgctgcattttgcgcaccacggcgccgtactcttcatcgctctgatcgacgtcgcagcgcatttcggcaaccgtcgttaccggcagcggcgcgggcggttcatttaactgctggcgaagctgggcgatacgttgcagaagacgctgtttctcattctccagcggcgtgaacaggctcgcctgaatgcgggtgcttttggtctggtgatcgatgaccagcagcgtctccgccaggtagaaacagtaatccgggcaggcagtatcggtattgagcgggggtaaatcctcaaaaccggccaccaggtcgtaagcgaacaggccgccaaagaacatcgcttcgcgctcggcctgcgggacgctgactaaatcctgtaacagacgaaacgcatcgaacaccgataacgagcacaggcgagcgtcttcatccaacagggcgctaaccggtgggaaggtgagtacccggctgttcggctggcgcagattctcaatgccggacggcaatgcattatccagcagttcaagcagcgcggcgccgttcgctgaaagcgcctggacagtgacggtattgccaagagcggtaatgcgcagggcgctatcgaccagcagcaggctttttaaatcgtctttactatcgatgtcggccgattccagcagcaaggttgccggacgcgcgccgcataattgatggaataacgccgtcgggttttcgcgatagatggcgtcgctggtgagaagctcgagcgctggttttgatgtttgcattatcattctcgcctgttctgttcattatttcgttcaaaaaaaagcccgctcagtggcgggcccggtatctgtttgctgagtgcaaaacgcgatcacgccgcccgattccaggaacgacgccaccagctatgaagagtaataatttgcgctttcatcagagatacccgttgtgtgaacttgcgtactagttaactggtccatgaaaataaagtcaacccttgtttgcagattttctttctcagtcgttatcataatgcgcttatttcagttcaggtccaccaggagccattttgagcgacactaattacgcggtcatttatgacctgcacagccataccgtcgcctccgatgggcgattgactccagaagagctggtacatcgcgcgcatgagatgcgggtggggacgctggcaatcaccgatcacgatagcgtggcggccattccggcagcgcgtgccgaaattgcgcgggctgaactgccgctcacgcttatcaccggggtagaaatttccaccctgtgggaaaaccacgaaattcatatcgtcggactgaatattgatatcgaccatccggcgatgacgcaactgctctgtgaacagaaagcgcggcgcaaccagcgcgggcagatgattgccgaacggttggagaaagcgcgtatccccggtgcctgggaaggggcgttaaagctcgccgatggcggcgcggtcacccgcggccattttgcccgctttttagttgaagccggctttgcgagcaatattgccgatgtattcaaaaaatatctcgcccgcgggaaaaccggatacgttccgccgcagtggtgtacaataaaacaagcgattgatgtcattcatcattctggcggcaaagcggtgatcgcccatccggggcgttacgatctttccgccaaatggctgaaacggctgttggcccattttagcgagcagggcggcgacgcgatggaggtcgcccaatgccagcaggcgccgcatgagcgcgcgcagctggcgagctacgcgcaacagtttggtttgatggcgtcgcagggttcggatttccaccagccctgcccgtggattgaactggggcgcaaactttggctacccgctggcgtggaagggatctggcgcagttgggaagtggccgctgaacaaattgagagggaagtatgagccagtttttctatatccatcccgataatccgcaggcgcggttgattaatcaggcggtggaaattgtgcgtaagggcggggttatcgtttatccaacggactctggctatgccctgggttgcaaaatcgaagataaaggggcgatggagcggatctgccgtatccgtcagttgccggatggccacaatttcaccctgatgtgccgcgatctctccgagttatcgacctacgcgtttgtcgataatgtggcgtttcgtcttatcaaaaacaatacgccgggcaactacacgttcattcttaagggaacgaaagaggtgccgcgccgcctgttgcaagaaaagcgtaaaaccattgggatgcgggtgccggcgaaccctatcgcccagatgctgctggaaacgcttggcgaaccgatgctctcgacatccttgatgctgccaggtaatgaattcacggagtccgatccggaagagattaaagaccgtctggagaaggtggtcgatctgattattcacggcggttatcttggccagcagccgacgacggttatcgacctgaccgaagacgcgccggtggtgcttcgtgaaggcgtcggtgatatcaaacccttccagtgatgcttctcgcgggtggcgtttcacgcgtcgcccgcggcttaaatttattttaaaatcctttccgcattgagtcgctcctttcttatttatattattagtccgcttacgatatcactcactgatattgcttccagaaagaaattcaacattatgcataagctgactattcaaccctctgacgcgtttaagaggaagaaagtactgttaaattttttcatgctttctagtgttaccgttaccttatatctggtgggtaaagtcatacattaagctctggtggtattcagtgataataatcttataatagtgattacataccgttaatatatgccaaagctgaccccaaatacctatcccatcaccctggtaaaaagcgtgctggtggtttcactgctggcgctaatactgattattatcagtttgactggcttgtttaactatcagtcgcgtcaggtcagtagtgccattgataaaaaaatcattggttctcagtatgcgtttattcagcataaacttgaggatgccgtcgatcgcccacgacaaataacgaatctatttttacaatatattcagggcgaaaataacaacatcgataaggatactttagttcctgaaatggtgtatttgactgcgagcgcgtttaaaaccatgcccgccttccagagcctgtcgtggtttgcggaaaatggctccagtattgctgttattcgtgacaatcatagtaatcaaatttatttacaacgaacccagcgtgataatcatcactccctggttaaatacagcgggttaagcccgcagaccaatattgtcaacgtcaataacgcgtttaatgttgctgatttaccgcagtttcgccgcgctcgccagcaaacgcacggtttctggcaacgctctctctctaccggcagtttgatcatgagctggaaccagccagtgtacgataaacaaggccgcttcgtcggggcgattgccagcggcgccacacctgcagatatgaccgcttatttacagagtctcctgccggataaaagctatgctctcctgcttatcgatgacaacaatcgcattgtcgcgcgttccggcaaccaacataaatggcagcaagatcgccaactgatagcaaagcttacctcggcgcagccgtcgccgacgtcattttccttgcgtactgaggacgagtctttgttggcgaccgcctttagcgtgcaggaccgccaacatctgctgaactggaaggcggtacttatcgcgccacagcatgcggaaatggcggaaatgaataaacagcgtttacttgtgaccttcaccacgacactgtttatttttattctgatgttggttcttctgatgattatttctcatttcaccggcgccttaaaggacgttgcagataaagtgcgtctggggttaatgccgtggaagaaaccaactaaacgcgtatttccggaaatagcctcgttggatgcagcattgagcaacctttatgcaattattccagacactttcgaatctaaacgccgcaaactggaagaagatagcgaaaccggttttttaacccgtagcggtttactgcattgtgagtcgctgtaccgtcatcgcaatatgctggcgatggtacacgttaacaactacaactcggttaagaatgtgctcggtacgactcaggcccgacagtttattcaccagtttactttacgccttcgcaaaatattgcctgaaggggcactatgttgtcgtgatcgagaagacttgttcattatcgcttttgatggcatgtatgccgaaaaggatgtcgactggtacagcgcgctacttgcttctgtttttcgtatgtctgcttctgatatgcccggcgaatcgcatatatttactggccatattggcatgttgattgaatcattaaccccagagaacatcggcgaatgtctgatgaatgttagtctggctttacagcatgcccagatggagcgtagcggcacgagtaaacttttcatggccgccatgcgtgaagaggaagtgaataatctgcgtctgcatcaggcgttatgcgacgatctccattcggaaggtttccatctggttttgcagccgatcgtttcatttgaatcgcagcggccttgtaaagaaggtgaatgcctgatccgctggcaatcaaatgtgttgggtttcgtgccgcccgacaaatttatcgcccttgccgagcacaccggcatgattgtgccgttagggaaatggataattgaaaccgcctgtcgtgaacttgccgcgtttatcacgcgcggcgcggcgcgtgattttaaactgcacgtcaatatctcggcaattcagcttcagcaacctgattttgctcagcatctgctggaatcaattcacgctaatgatttgatgaacagcaatatttgtcttgaaatcaccgaaagcgtcttgctgcatgacacgtggcgaattgtcgaaatactggcttatctacgtcgtcttggcgtatgtatcgcgattgatgattttggttccggttattccagcctctcgtatctgcattcgctgccatttgattgtctgaagattgaccgcgggtttgtcagcaatgtgcttgatgataaaaaaaacgaagcggttatcgcctcggtgttaatgttggcgcgaagtttttccgtgccgctggtggccgaaggcgttgaaacgcgcgaaatggcagaaaaactgcaggagatgggctgtgatttggcccagggatattattattcccggccgaaaacgtttgatagttttgacgtcgccaatgggtttttcgttgttgaaccggaatgatgagatagaccaacggcgataataacgatgcaaatattaaaaaaacagctttcggtcaacagctacccgttcaccctaactcaggccatcatatttaccttagccacgacaattctcgtcgtgctgctgacgacatatgcttttctctactacgaaggttatgctttttttgatgaggtgagtgaggatattctgcgtgcgaaaagagtcaatatcgaggaagtcatccacgattatattgatgttcccgcgcaatcgaacgcgatactggttcatgcgatcggacgtcaatccagtactgcgatcccggttcgcagcctgatcggcgaaatggtcaataccaccaataacgtcttcagcaacaaacattatctgaatctggtcggatttggcgcggtcaatggcgattatattcaagtggcgcgcggccaggccgagtcgaatgattatcttgcggtaaaagatgcgcaaacagatcaccatctgacggcgtatagtcacctgacggtgaactcattggaaaaagcggtgcttgcggattatcaaataacgcagcgcgaatggtatgcggcggttgccaaagaccagcgtccgcactggacaaaaccctttcgcgattatgaatatgaaaatgaaattggcgttgcgttcagctcaccggcattcaatcgccagggacagtttgttggcgtcgtcgccagcgagttgcacctcaacgaactaaataaaagtctggaaaaatttaaaccccatcctgaaagtattctgctgattgttaatgaaaaaaatgagctcatttcttcatcagtgccatcattgacgcgaaatatgctggccgggggaaaacactcacggctgaatctacaaacgcttgaaaacactcatttaccggttgttgtggcagccagtcgcacgttaaaagcgaatcaccatacgggattgcagtttttcagttccggcaaagaagaatattatgttgatgcttttccaatcaccgaccgagatgacatattgcactggacggggattgtgattagcccggcgagaatgattacccataccatcattaaatatatagccattaccatgatcatgctgtttgtcatttttgtacttggtctgctggtggttttctatggcctggcgaaggtggtaaaaccgctgcgagatattgtccgtaaagcggatcagcttgcgacgcaccgctggacgccgccagataataagcgtcatttcccggaaatagcctctctggaaaccacatttatggcgctatcgcataagctggcagaaagtttcgacgcccaacggcgtgaaatagaggaggataaaaccaccgggttattctcacggacagggttactgcgtcagacatcgctatatcaaggtagaaacctgctcgcgctggtgcatatcagtaatatgaacgctattatcaattccttaagtacggagtatggtgaaaaatttattagcgattatattcttcgcctgcataatttactgccgacgaatacgctgattgcccgcgatacagtggataagctcatcgtggtttttccaggacaaactcagccaaaagagcgtcagcgctacagagaactgctctcctcactatttatcgacgtcaataatgaagcgtctcctacggcaagcaaatacgtttataccggcaatattggccttgtgacgactgagatccacgcagagaatattgaacaaacgttgcgtgaggcatggattgcattacgccatgcgcagaaacagggaaacggcgttgcgacgttttacagctgcgagatgcatgaggctgagctttataatatccaactccatgagcatcttcatgatgcgatccagcaacatgaatttcatctgatgctacagccaattgtggatttgcaggatcaaagcgcttttcaggaaggagaatgtttgcttcgctggcgctccgaaacggtaggcgaaattcctcccgatcgtttcctccccctggcggaagagagcgggttgataatcccgctgggacgctggattattgaacaggcctgtcgggaactttccgcgatgattctccgcggggcgccggcaaactttattctgcatatcaacgtatcggcgattcaactcctgcaacaggattttgcctggcatttaatggatgcgatttatcgtcatgggctggtcacgggcaatatttgtcttgagataaccgaacggttattgatgaatgatgctgtgcgaattagccggatgattgcttatctccgccgccatggtattgccgtcgcgctggatgattttggcgtcaatttatccagtttgccttatttacatacgctgtcatttgatagcatcaaaattgaccgccgtctgatttgccaatttgccgatgatgataaagcagaatcgatgattgcatcgctgattgtgctggctcaggggtttaaggtacccgtcgttgctgagggtattgaagatgaggcgataaaaaaccagttacgcgacctcggttgccagaaagcgcaaggttatctgtttggtcacccggcgccatttgccgactttcccttcctggcaagtgcattgacggcgagcgataatctatagacagagaaatgtatcgcagtgaagcattcattttgaagttagtgtagtatgttcgcccacgcaggcgcgcgcgctgttttacagtgctgacgaatggcgccttaaaatgtgtaaagtatttatataacaacaggttggtggttttatatggcctgttgttgccaaagcatatcagacgcctgggaaggcgacacctaaaggaagctctatgagcgagaaattacagaaagtgctggctcgtgctggccatggctcccgccgcgaaattgaaactatcatcgaagctggccgcgtcagcgtggatggtaagatcgcaaccctcggcgatcgtgttgaaatcgtacctggtttgaaaatccgtatcgacggtcatcttatttcggtaaaagaatctgccgagcaaatttgtcgggtattggcctattacaaaccagaaggcgaactctgcacccgtaacgatccggaagggcgcccaacggttttcgaccgtctgccgaaactgcgcggcgcgcgctggattgcggtaggtcgcctcgatgtgaacacctgcggcttgctgctgtttaccaccgatggtgaactggcgaaccgtttgatgcacccaagccgcgaagttgagcgtgaatacgccgtccgcgttttcggccaggtcgatgaagacaaactgcgccagctggcgcgtggcgtacagttagaagatggccctgcagcgtttaaaacgattaagttcaccggcggtgaagggatcaaccaatggtataacgttaccttgaccgaagggcgcaaccgcgaagtgcgtcgcctgtgggaagccgtcggcgttcaggtcagccgtcttatccgcgtacgctacggcgatattctgctgccgaaaggcctgccgcgcggcggctggactgaactggatctggcgcagaccaactatcttcgtgaactggtggagctgccggcggaaaccgaaagcaaagtagcggtggagaaagatcgccgtcgtatgaaagcgaatcaaatccgccgcgccgtcaagcgtcatagccagaccagcggcaatcctcgccaggggaataacggcaaccgccgttccagcacccgcaacaagactaacggctaatgctgtacattccggcgggttcccgccggaatgctcctctttttcccctcgcttgtgacatttttcacactttcgcataaagacaagaaacaggaattacgcagacaaataacgcaaagtgatgttattagcgtcgccatatactgtcggcactgattacaaaacaggtagcccgcaatgagtacaacaacaaagttatcggcaagctatgtggtcatcggcgtaaaagaaaagataggctatggcttaggcgatttcgcctctaatttatcgttcggttttgtctcgttattcttactgtttttttatactaatgtttatggcatcagcgcggtacaggcgagtctgatctttgtgattgcccgggtgattgacgcaatttttaatatcctgattggctttgcaattgataaaacgcagagtaaatatggcaaattgcgtccctggctattatatggtgcgataccgttaggctttttaaccgtgttgtgttttgtgccatttggcggggaagctaaattttatttcgcgctggcctcctataccatctattgcctggcctatacggcggttaacacaccttattcggcattgaccaaccgcttgacgcagcatgaggcctcgcgttcgtcgctgtcggtatatcgctttgtgttggctattgtcgggtatctgattgtttccacaacggcagactggctgatttcgccctttaacgacaaacaaatgggctatgtctttgccgtttcctgctttgcgctgttagcgacttttatgtttcttgcctgttttggcatgaccaaagaacgcgttggtgaagaggataaaatgaatgcgccgacgcttcgcgaaatgttccgtgcggtattaggtaatgcaccactgattcatctttcattatttaccgtgtttttctatatcgcctataccgtatggatggcgatcgctatttactttattaaatacattatcggtagcgaagggtttaccgctactttcttcatgattcagtctggcgcttatattattggaaccattatctctgagaaagtgattgcgttaatggggaaaaagaaaatggcgcttctggcgttgttaattggcgtgctgggggtactgatgcaatatttcatcgctggtaataacctgtggctgataatgatcggcgtgtgtctttacagcattacgcttggcatgggctttgtcgccatgtggtcgatgattgccgacaccgtcgaatatgctgaatggcatcacggtgtacgctctgagggggccatctacggtttctttaacttcatcactaaaattgcgatggcgattggcggcggctgcgcgggctggatgctggatctttatcactatgatgcgggtaatgtgaccagcgatgcgattaatggcatcaatattctgatgacgcttttccccggcgcaatgttcgccatcagcgccatcttcgtggcctgctatgcgttagatgaaaatacctatcgcgatatcgtgcagaaaatcagcctgcgtaagcaaaacgcgctttaacctcaaggagtcagagagatgaacaacgattttagtaccgttatcgccgccatgtcggtagaggaaaaagtggcgctgctgaccggcagcggcctgtggcgcacggcatcgatgccgcagcacggtatccccgatatcgtgatgaccgatggtacctacggcgtgcgctatagcagcgcgcaaatagatggcaatgaaaagtggagcatggatgacttcatctcggtgattacccaaaccgccgaccaggccagcgccgacgagcctgtcgccaagggcggcagcgaagcgttgttcagcgcctcgctgccggccacctgttttccgaatggctccagtctggcctgtagctgggatgttgaactggtacgggagatgggcgaagcgctgggtcgcgaatgccaacagatgggggtgggtattctattggggccgggaattaacattcggcgcaccccgctggctggacgcggctatgaatactattcagaggacccggtcgttagtggggatatcgccgcggcgctgattaacggcttacaggccgaaggcgtcggcgccagccttaaacattttgccgccaataactccgagtatcggcgtaccgaaatggattcgattattgaggagcgggcgctgcgtgaaatctatctcgccggatttcaacgagcgatcgccaaatccaagccctggacggtgatgtcttcttataatcgtcttaatggcgttcaaacatcgcaggatccgttcttactgacccaggtattgcgtgatgaatgggggtatgacggtctggtgatgtccgactggtacggtattaaagatcgcccggcatcgctgcttgccggcaatgacctggcaatgccggaaacccgccgggacaaacaaaccctgctggcggcaatctcctgcggcgaggtaccgatgccggtggtcgaccgggcgtgtctgcggatgctggaactggttgataaagtgcaacgacatcgccggccgcacacgcgtgctgactttgccgcacaccatgcgttatcgcagcgtttagcggcagaatccatcgtattgctgaaaaatgatgacaatctgctgccgctgaagccacacaaaacgccgcgcatcgcggtgatcggtaaacccgctcaggagccggttattcagggctcgggttgtgccaccacggttccctatttactcgaccgtccgctggatgagattttcgatcttgccggggatgactttaaggtcacttgggcgccgggcgcgccagacgacaatcaaagcgacgagcaggcgctggcgcaggcgcgtgacgtcgccggagccgccgatgtggcagtgatttttgtcagcacggcggtcggtgaagatggcgagaatggcgatcgccaggatctgaatattcttcccgcgcacgaacagctgatccgtgaggtcgccggggtacagccaaacgtggttgtggtgttggccaacagcgatgcggtggtgatgccatggcttggcgaatgccgggcgctgctggaaaccttcttcgccggacaggggatggggcgcgctgtggctgaaattctcttcggtaagcgcaacccctgcggtaagctaaccgtcacggtgccaaatactctcgaagagacgcctgcctggctacagtatccgggggaaaacctgcgccatcactatggcgagggcctatttgtcggctatcgctattacgataaacgccttctttcgccgcgtttcccgtttggctttggcctgagctatacccaattcagctatgccaatcttgcgctttccgcatcgcggcttgccgaaggcgaaaccctgcatgtcgcctttgatttaacgaatatcggcgattgcgagggcaaggagattgtacagctgtatgttacggccccgaaaggggagctgatccgcgaggttcgcgcgctgaaagcctttagcaaagtgtcgttgctggcaggggaaacgcgtcgcgttgagcttgcgctgcccgtcgctgatttagcctgctatcatccagggctggcggattggctggtgaccccagggcagtggcaaatctacgtgggtgcctcgtctcgcgatcttcccttaacggcaagcgttgagattgattgccctgcgcgctacgtaccgctgcgcgacgacaattctctgcagcagcttattcaacagccagaagcctttgcccgcgtggtagcgctgatatcggcgaagagcggggtagcgccagacctggtacgtgaaaagcttatccgcttggcgccagatctgttctgtggtttgctgattgcattgactgagttcctggcgctggatatcgatcgcgacgaactcaatgccgtgctggcgggtcattaatcaacaaaagttcaggaggtactccgtgttcccgttttcagtgacgcatccccgtcaggtgacacaaagcgggcagccggcgaccaatagcggctacgagctgatcgccttcgacgctgagaaactcaacgtcttcgccgccgaggtgcgctactgcgaacctcactggcacccggcgccggagcttatcaccgtcctgcatggcggtttcacgctggccgtcggccagcgggagtggcaattgcgcgcgggcgatatgttgtatatcaacgcggaggaagtgcattcactcagcgcggagatgcccggtagccaactggtcacagtgcagttttcgccaggtctgtttgatgaaatgcatccttctccgcggctggagtggtgtaccgccgggcgtattgcgcagagcgtggattggcaggtgcgccagcggttaacggcgctgctgcaacagcttgtcgataaccgtacgccattccagcgtatcgcggcgatatatttgctgcttgatgcgctagtgacggcaggagagccgcaggagcgggaggagagctcgctacgcgaagagtcgatgattaaaaaaggcattgattatattaatctgcattacgaccggccattgaccttgagcgaagtggcagagcacagcggcatgagctattcgtggttttcccggctgtttaagcgggtgagtcgttacaactttaaagagtatctgaccctggtgcggctgaataaggctcgcaatctactgcgtgatacgcgtacgccgatcaccgaaatcagccatagctgcggttttcaggagcacaaatacctgatcgccgcctttaacaaatactgcggactgacgccgaccgagtaccgcaaacgctttgtttcgcggcaaaacgtcctcgaccagcagctggcgctcggcgaggactgcgtatgcctgccattaaacggccaactgctggcgaggctggcggttagtaatcaatccccatctgcgctttgaccccggcgtcaaaggcgtgctttaccgggcgtagttcgctgacggtgtcggctatctcgataatctcgcggtggcagccgcggccggtaatcatcaccgtttgatgcgctgggcggttgcgcagcgccgtcagcacctcttccagcggcagatagtcgtaagccaccatgtaggtcagttcatccagtagtaccagatccaggctatcgtcggcgagcatccggcgcccgtgctgccagacatcgaggcaggcggcggtatcgctgtcgcgattttgcgtatcccaggtaaagccggtggccatcacctggaactcgacgccgtgcggctccagcaaattacgctcaccgttaggccaggtacctttgatgaattgcaccacgccggcttttttaccgtgtccaaccgcgcgggtgacggtaccgaaggcggcggtggttttgcctttgccgttaccggtaaataccatgatcaacccgcgttcttgctgggcggcggcgacccgcgcatcgactttgtcttttacccgctgctggcgctcgcggtagcgttgatcgctcattgggagatccctggtttacgccccggctgggcatcgaaggtcataccggttttgcgccggctatcgtcgcccatcagccataaatagaccggcatgatatcggcgggggttttcagcttttgcggatcttctgtcgggaaggcgctggcgcgcattttggtacgcgtcccgccgggattaatacaatttacccgcagatgacggctttggtactcttcggccaggacctgcatcatcccttcggtagcgaatttagaggccgcgtaggcgccccagttggcgcggccctggcggccaacgctggaagaggtaaacaccagcgagccggaatcggacttgagtaataaaggaagaagcgcctgggtgagcataaacgtgccgttaacgtttacctgcatcacctgctgccatacctcaggatcctgctggtccatcggacagacgtcgccaagcaggccggcattgtgcagcacgccgtcaaggcgcgggtagtgaatcgcgattttctgcgccagctgctggcactcctgcggcgtgcaggtcaacaggtcgagggtgaaccagcgtgccgcaataccgccagcctgttcaatttcttgcgcgacgccgcgcagtttttcttcattgcggccaaccaggaccacgcttgcgctgtagcgcgcataggtgagggcggcttcacggccaatgccgtcgctggcgccggtgaccagaatgatacggtctttaagtaggtgatattgcggttgatagtgcacggcgactcctctgctggcctgcgtacggccatgtcttattcggtatcttacttttgcgctttatgcctcaaacgattgatgattgcaatcagtcaaagggaaactcttcgcagaattaatatcttgcaacgatttcattgcgacaaaaaaaacgggaatgcgcctcgcagcgcacggaaagcgcagagacttgatgataaaggctgatgtacactgtgcgtcaacgtcagtgctttacacaaggtgaaaacgtggaattacttgctcagtacggcttatttttagccaaggctgcgactatcgtcgtcgccattgcggttatcgccgccattatcgttaatctgactcagcgtaagaagcagcgcggcgagctgcgggtaacgaatcttagcgagcaatataaggagatgaaagaagagctggcggtggcgctactggatggcccgcagcaaaaactctggcataaagcgcagaagaaaaaacataagcaggaagccaaagaggccaaagcgcgggcaaaattgggtaccgcggaacccagcggcaaggcgcgtgtctgggtgctggatttcaaaggcagtatggatgctcatgaggtaagcggcctgcgtgaagaaattacggcggtgctggcctcggcgaaggcgcgcgaccaggtggtggtgcgtctggaaagccctggcggggtggttcacggctatggcctggcggcttcgcagctgcagcgcttacgtgataaacaaatcccgctaacggtcgcggtcgataaggtcgctgccagcggcggctatatgatggcctgcgtggcgaacaaaatcgtctgcgcgccgtttgctatccttggctcgattggcgtagtggcgcagatccccaacatcaatcgcttcctgaaaaataaagacatcgatattgaactccataccgccgggcaatataaacgcacgttaaccatgttgggcgagaacaccgaggaaggtcgacagaagttccgcgacgatctcaatgaaacccatcagctttttaaagatttcgtccatcagatgcgcccgtcgctggatatcgaaaaggtggcgaccggcgagcactggtacggtgtgcaggcgctggaaaaagggctggcggatgcggtacagaccagcgatgaactcctgttgagcatgatggataatcacgatgtgattagcgtgcgttatcagcagcgtaagaaattgctcgatcgcgttaccgggagcgcggcggaaagcgctgaccgtctattgttgcgctggtggcagcgtggacaaaaaccgttaatgtaataaaaacaacgcgaggctgatacctcgcgttgttgtttctggctggcttaagccgagagccggcccatcaatgactggcggttaatcaaccaggtgatacttatctgacaactcatgagcgagatacttgaacatgttaaatacggcagtgctcttcgctgtcggcaaaccttgttcatcaagataaaactcgccgctgaacaccaaaaccccgttacgctgaacgacgttggtggcttcaattccggctaacgtatcttcatgatcgcgaatgagttggttggcaatttcaagtaacgcctggcgttcgatgggttgggttgtaccttgcataacggactcctgtagttcttcgccggtagtctacgccgcgagagggcaacgggcaaattttccattgattgtgcaggggtaattgcaactggctaagaaacatcactttactggcggagttagcttttgcatgctaataaagttgcgtaacgaattttatcaggtacagtgtgacgctttcagcgatctggcaacagatttgcttgacattcggccaaaaattcttcgtgctatgcaacctggctcgcaaaagccagcaaactcagctatctggttttatggatgtgaaactgggcgtgcagagggttgatatccatcgacgtggccgcaacatatcaggcacgtcgctagtggatggtgaatcaatgtgcgatgtattcctggatgaattaaattaggtaaaggtgaatatgggtaaagctctcgttatcgttgagtccccggcaaaagccaaaacgatcaataagtatctgggtaatgactacgtggtgaaatccagcgtcggtcatatccgcgatttgccgaccagtggctcagcttccaaaaagagcgccgactctacctccaccaaaggggctaaaaagcctaaaaaggatgaacgtggcgctctggtcaaccgcatgggcgtggacccatggcacgactggaatgcgcattatgaagtacttccgggtaaagaaaaggtagtttcagaactcaaacagttggcggaaaaagccgaccacatctatctcgcaaccgaccttgaccgcgaaggggaagccattgcgtggcacctgcgggaagttatcggtggtgatgagcaacggtacagccgcgtggtgtttaacgaaatcaccaaaaacgcgattcgtcaggcctttgagaagccgggcgagctgaatatcgatcgtgttaatgcccagcaggcgcgtcgctttatggaccgcgtggtggggtatatggtttctccactgctgtggaaaaaaattgcccgcggtctgtccgcaggacgcgtgcagtctgtcgcagtccgcctggtcgttgaacgcgagcgcgaaattaaagccttcgttccggaagagttctgggagatcgacgccagtactaccacgccgggcggcgatgcattaccgctgcaggtgactcacaagaatgacaagccgttccgtccggttaaccgcgacgaaaccatggctgccgtcgcgctgctggaaaaagcgcgctatagcgtgctggagcgcgaagataagccgaccagcagcaagccgggcgcgccgtttatcacctccacgctgcagcaggccgccagtacccgtcttggcttcggcgtgaagaaaaccatgatgatggcccagcgtctttatgaagccggccatattacatacatgcgtaccgactcaaccaacctgagtcaggatgcgctgaacatggttcgcggctatatcggcgataacttcggcaaaaaatacctgcctgaaaacgcgaatcagtacgccagcaaagaaaattcgcaggaagcgcacgaagcgattcgtccttctgacgtgaacgtgatggcggaatcgctgaaagacatggaagccgatgcgcagaaattatatcaactgatttggcgtcagttcgtcgcctgtcagatgaccccggcaaaatacgactcaaccaccctgacggtacaggctggcgagttcaaactgaaagcccgcggacgtacgctgcgctttgacggctggacgaaagtgatgcccgcgctgcgtaaaggcgatgaagaccgtacgttaccggtggtcaatcagggcgacagcctgagcctggtggaactgaccccagcgcagcacttcaccaaaccgcctgcgcgtttcagcgaagcctcgctggtgaaagagctggaaaaacgcggcattggtcgtccgtccacttatgcgtcgatcatttcgaccatccaggaccgcggctatgtacgtgccgagaaccgtcgtttttacgctgaaaagatgggtgaaatcgtcaccgaccgtctggaagagaacttccgcgatctgatgaactacgattttaccgctcagatggaagaccgcctcgatcaggtggctaatcatcaggccgagtggaaacaggtactggataacttctttggcgatttcacttcccagctacagacggctgagaaggatcctgaagaaggcggcatgcagccgaacccaatggtgctgaccagtatcgactgtccgacctgcgggcgtaaaatgggcattcgtactgccagtaccggggtattcctcggctgctctggctacgcgctgtcgccgaaagagcgttgcaaaaccactattaacctggtaccggaaaacgaagtcctcaacgtgctggaaggcgatgatgccgaaaccaacgcgctgcgcgctaaacgtcgctgtcagaaatgcggcaccgcgatggacagttaccttatcgatccgaagcgcaaactgcatgtctgcggcaacaacccgacctgcgatggctatgagattgaagagggcgagttccgtatcaaaggctatgacggccctatcgtggagtgtgagaaatgcggctccgaaatgcacctgaaaatggggcgttttggtaagtacatggcttgtaccaacgacgagtgtaaaaatacgcgtaagatcctgcgtaatggcgaagtggctccgccgaaggaagatccggtgcctttaccggaactgccatgcgagaagtccgacgcttacttcgtcctgcgcgatggcgcggcgggcgttttcctggcggcaaacaccttcccgaaatcacgtgaaacgcgtgcgccattagtggaagagttgtaccgcttccgcgatcgcctgcctgaaaagctgcgttatctggccgatgcgccgcagcaggatccggaaggcaataaaacgctggtacgctttagtcgtaagaccaagcaacagtacgtctcctccgagaaagagggcaaagcgaccggctggtccgctttctttatcgacggcaaatggactgaagcgaaaaagtaaccttctgaatgggccgcaatgcggcccattttctctccgattatccacgcgcaccgcctcgtcgctcccgctttataaccgacttattattttttgttaccatctatacactgtagatataaatgatatagtggttatagagaatcacttttttattatcaaatcgtcttatacatcatcggtttcaggacgcgttgtggcgctggttcggcgcgccgcagggaatgtctggcattttgccgccagcaggcagcagtctgaacgtaatgtgtattaagcggattcattttacgcgtttacggatatcagccatgaaactacagcaactccgctacatcgttgaggttgttaaccataacctgaatgtctcctctaccgccgaaggtttgtatacttcgcagccaggcatcagcaagcaggtgcggatgctggaagatgagttagggattcagatatttgcccgcagcggcaagcatttaactcaggtcactccagccgggcaggaaattatccgcatcgcgcgcgaagtgctgtccaaagttgaggccattaaatccgtggcaggggagcacacctggccggataaaggctcattgtacgtcgccaccacccatactcaggcgcgttacgcgctgcctggggtgattaagggctttattgagcgttatccgcgggtctctttgcatatgcatcaggggtcgccgacgcagattgctgaagcggtttcgaagggcaatgccgactttgccattgctaccgaagcgctgcatctgtacgacgatttggtgatgctgccgtgctaccactggaaccgctcaattgtggtgaccccggatcacccgctcgcttctaaaggctcggtgaccattgaagagctggcgcagtacccgctggtgacttataccttcggcttcaccggacgttccgaactggataccgcgtttaatcgcgccgggctcactccgcgtatcgtcttcaccgcgactgatgccgatgttatcaaaacctatgtgcgtttagggcttggtgttggggtcattgccagcatggcggtcgatccagtgtccgatccggacctggtaaaacttgatgccaatggtattttcagccacagcaccaccaagataggcttccgccgaagcaccttcctcagaagttatatgtatgattttattcagcgttttgcgccacatttgacgcgggatgtggtagacacagccgtggcgctacgttcgaatgaggatattgaggcgatgttcaaagatattaaactgccggaaaaataatcgtattgctaaatggcatttcctccggggagtgccattttctattatggaccttatcagaacttataaacctcgttgtaatcacatttctgcgtatttcacttcattactttttcattatacccgctgcgatcaaaataacggctaaaagccttttacctgttcctgaattagctggatctattttatatatcttattaagatttatctgtacctgatgattttagcaattggtggtgatgaaatgataaacaatatcgattatacaaagctcgcgatggcataccaaagtgacaaagcggaaatcgatccaacgctgcgcagtcaggtctggggctcactgctggtggggcttagcgctttctggtgcatcgttgcattattcatctggattattagctaaagcagtttatcagagaaagttatatttcacttttgtgacaaaaggaggttggtaaaattagcacccggaattgtgaaacactgtggaagaaattattttccgacttatcagctttaaatgttaatccatcctgagctaatcacgacaaaccgtgattagctcttttttgatcacacttctttagctgtttggaacttacttaacctcatcaaatatctcctcgttgtaatatcgctatcatcaaattttctgaatcgtacggttttgtcaattttagcaatttgagttgttatcaaagtgttatgtcaggtttgtgttatctttaataaagaccctgaggagttcagggcatgcatccctgtgataaaggaggagctatgtcgtcaacattacgagcagccagtaaggatacgctacaggtcaaagacaaaacctaccattactacagcctggcgctggccgctaaacaactgggcgatctcactcgactgcccaaatctctcaaagttctgcttgaaaacctcctgcgctggcaggacggcgattcggtcaccgaacaggacattcaggcgctggccggctggctggcgacagcgcatgctgaccgcgaaatcgcttatcgcccggcacgcgtgctgatgcaggatttcaccggcgtaccggcggtggtcgatttagctgccatgcgcgaagcggtaaaacgtctgggcggcgatacggcgaaagtgaatccgctctcgccggttgacctggtgattgaccactcggtgacggtggaccgttttggtaatgaaaacgcttttgaagacaacgtgcgtcttgaaatggagcggaaccacgagcgttatgctttcctgcgctggggacagcaggcctttagccgctttagcgttgtgccgccgggtaccgggatctgccaccaggtgaaccttgaatatctcggccgtgccgtctggagcgaactgcagaatggcgaatgggtggcgtacccggatacgctggtgggtaccgattcgcacaccaccatgatcaacggccttggcgtattagggtggggcgtcggtgggattgaagcggaggccgcgatgcttggccagccggtatccatgctcattcccgatgtcgttggtttcaagctgaccggtaaactgcgtgaagggatcaccgcgaccgacctggtgctgacagtgacccagatgctgcgcaaacacggtgtggtaggcaagttcgtcgaattctatggcgatggtctcgactcgttaccgctggccgaccgggcgaccattgcgaatatgtcgccggaatatggcgcgacctgcggattcttcccgatcgatgcagtgaccctcagctatatgcgcctgagcgggcgcagcgaagagcaggtggcgttggttgaagcttatgccaaagcgcagggtatgtggcggcagacgggcgatgagccggtctttaccagcaccctggcgctggatatgggcacggttgaggccagcctcgccgggccgaaacggccgcaggatcgcgtcgcgttgggcgatgtgccgaaagcgtttgccgccagtaacgaactggaagtgaatcaaacgcaaaaatcgcgccagccggttgattatacgctcaatgggcaacgctattcgctgccggaaggcgcggtggcgattgcggcaatcacctcatgtaccaatacctccaacccgagcgtgctgatggccgccggcctgctggcgaagaacgccgttgagcgcggcctgaaaccgcagccgtgggtgaaagcctcgctggcgccgggttcgaaagtggtttctgattatctggcgcatgccgggttgacgccttatcttgatgagttgggctttaacctcgtagggtacggttgcacaacctgtatcggtaactccgggccgctgccggaacctatcgaagaggcaatcaaaaaaggtgacctgaccgtcggcgcagtgctctccggcaaccgtaacttcgaaggtcgtatccatccgctggtgaaaaccaactggctggcgtcgccaccgctggtcgtggcttatgcgctggctggcaatatgaacattgacctgacccgtgaaccgctcggcgtcggtaaagacggtaagccggtgttcctgaaggatatctggccgagcggcgaggagattgctcgcgcggtgcagcaggtttccaccgacatgttccgtgaagagtatgccgaagtcttcgaaggcaccgaggagtggaaagcgattcaggttgagcgttccgatacctatcgctggcaggatgactctacctatattcgcctgtcgccgttctttgatgagatggaggttgagccgaaaccggtagaagatattcacggcgcccggatcctggcgatgttaggcgattcagtgaccaccgaccatatctctccggcaggaagcatcaaggcagatagcccggcaggacgctatttgcaggagcacggcgtggcgcgcggtgatttcaactcttatgggtcgcgacgcggtaaccatgaagtcatgatgcgcggcacctttgcgaatatccgtatccgcaacgaaatggtgccgggcgtggaaggggggatgacgcgtcatttgccggacacgcagcctatcgccatctacgatgcggctatgctgtacaaagctgaaggtacccctctggcggtgatcgccggtaaagagtatggctcaggctccagccgcgactgggcggcaaaagggccgcgtctgttgggcgtgcgggtggtcattgccgagtccttcgagcgtattcaccgctccaacctcattggcatgggaatattaccgctggagttcccgcagggcgtgacgcgtaaaacgctacagctgaccggcgaagagcggatcgatatcagtaacctgcaggcgctgcatcctgcggcaacggttccagtcacgattacccgcgccgatggacagcaggaggtcattcagtgtcgctgtcgtatcgatactgcgacagaactgacttactatcagaacgacggcattctgcattatgtgattcgtaatatgctgtaaaagaaagggccagcgaatgctggccctgattcattctggagctgatttatttattcagcagatgccccatcttggcagctttggtatcgagatagtgttcgtttttcgggttacgcccgacgatcagcggcacgcgctcgacgatattgatccccgcttcagtcagaatttcgactttcttcgggttgttggtcaacaggcgaacctgctctacgccgagcagtttgaacatgtcggcgcacagcgtaaagtcgcgctcatcggcggcaaagccgagctggtggttggcttcgacggtatcgtagccttgatcctgtagcgcgtaggcgcgaattttattcagcaaaccgatatttcggccttcctgacggtgatagagcaggatcccgcgcccctcttcagcgatgtgcgacagcgccgcttccagctgaaaaccgcaatcacaacgcagactaaaaagggcatcgcccgtcagacattctgagtgtacgcgagccagtaccggggcttgccccgaaatatcgccatacaccagcgcgacatgatcctgcccggttgccagttcttcaaagcccaccatcaggaaatcgccccagggggttggcagtttggcttctgccacacgtttaagctgcatgtgattctccagattctgacagcacctgaatgtgctttctgtttactactattttgccacaacgccgcgacgttctcctaattaccaacgaccgcctgcgcggaaagcgcacaaacgatctactttccgttatgatattcagaaggaaagagaaggagatacgatgctgttgattgccaaaaggaccgccatcggggcggcgctattgcttgttatgcccgttatagtctggctctccggctggcagtggcagccgggtcaagcaccggctatgttgaaaatgtggtactgggtgactgaaaccgtcacccagccgtggggaataattactcacgtagcgctatttggctggtttttgtggtgtttacgatttcgtctgcgcgaagcgctggtgctgtttctcattctcggcgccgctatcctggcaggacaggggcttaaatcctggatcaaagaacgggtgcaggaaccacggccgtttgtgatttggttagaacgaacccaacaggttccggtggcgcaattctatgagttaaaacgtaaagaacgcgctaaactggtgcatgagcaattggctgaacaacagacaataccggggttcttgcgtaaacactggcaaaaagagaccggttttgcctttccgtccggccataccatgtttgccgccagttgggcgctactgggggtagggctgttgtggccgcgccggcgctgggtaactatcggtttgctgttgggttgggctactgcggtcatgggcagtcgtctggcgttgggcatgcactggccgcaggatcttatcgtggcgaccagcctttcatggctgctggttaccgcagcgacctggctcacgcagcgtttttgcggcccgttaaccccgcctgttgaagaggcgagcgatatcaaaaaacgcgcaacctgacggcgtttatgttgaatttcgcggcatctggccgcatatcatgatgggtgtcatgcttttccatttcaccactgcggtgaaaatgatactttatagggcttgaacgcgttttactcgcgccacccacagaacgggaagtcatgtgaaatatttacttattttcttactggtattagctatcttcgtcatctctgtgacgctgggcgcgcaaaatgaccaactggtcacgttcaactatttgcttgcccagggtgagttccgtatctccacgttgctggcggtactgtttgctggcggatttgccattggttggctgatctgtggtctgttctggctgcgggtacgtgtgtcgttggcgcgcgccgagcgtaaaattaaacgcctggagcagcagatcgcgccagtggccgcggcgcccgctgatgccggcgtccctgcggtcaaggaataaccttctatgctggagttgttgtttctgcttcttcccgttgccgctgcctatggatggtatatggggcgcaggagcgcacaacagtccaaacaggacgatgctagtcgcctgtcgcgtgattacgtggccggggtcaacttcctgctgagcaatcagcaggacaaagccgtagatctgttcctcgatatgttaaaagaggacaccggcaccgtcgaagctcatctgacgcttggcaacctgtttcgttcccgtggcgaagttgaccgcgccatccgtattcaccaaagcctgatggagagcgcctcgctcacctacgatcaacgcctgctcgccgtccaacagttggggcgcgattatatggccgctggcctgtacgatcgcgcggaagatatgttcaagcagctggtggatgaaaccgacttccgcctgggcgcgctacaacaactgctgcagatttatcaactgaccagcgattggcagtccgcgattgaagtcgccgaacggctggtaaaattgggcaaagaaaaacatcgcagcgacatcgccaacttctggtgtgaactggcgctacagcagatggccagcaacgatctcgataaagcgatgacgctgctgaagaaaggcgcgtctgcggaccgcaacagcgcccgcgtctcgattatgatggggcgcgtgtggatggaaaaaggcgactacgcgaaagcggtagaaagcctggaacgggtgattggccaggataaagaactggtgggtgaaaccctggaaatgctgcaaacctgttatcagcagttgggtaagcatgcggagtgggaagcgtttttgcgccgctgtgtagaagagaacaccggtgcgacggcggaactcatgctggcgcagattatcgagcagcaggaaggtgccgaggccgcacagagctatgttacccgccagcttgagcgtcacccaacgatgcgcgtgttccataaactgatggactaccatcttaatgaggcggaagaagggcgcgcgaaggcgagtctgggggttttgcgtaacatggttggtgaacaggtgcggagcaaaccgcgctaccgctgccagaagtgcggttttacttcccacaccctgtactggcactgcccgtcctgccgctcgtgggcgactatcaagccgattcgcggcctggatggtcagtaacttctaaaaaaagccagactttagttacaacatacttgtctgagttttaccatgcccaattctgttgccgcgtgcccgcttttgtctgtagaggggcaaaagcagcctgtcattttccccacttcgcaggtagaatgctgcccgtttaccttttttgcgccctggcggcgctcatccacaattaaggtccggtcatgacgtctactgctacctcttctcctcgtgttatcacatcctctcccgtcgttgttgcgcttgattatgataaccgtgacaaggcgttagcctttgttgatcgaatcgatccccgcgactgccggttgaaagtaggtaaggagatgttcacgctgctggggccgcagtttgttcgcgacctgcatcaacgcggctttgaagtgttcctcgacctgaaattccacgatattcctaataccaccgcacgtgcggtcgccgctgcggcggaactcggcgtatggatggtgaacgttcacgcctcaagcggtgcgcgcaagatgaccgcggcccgcgaggcgctgttgccgttcggaaaaaaagcccccttactgattgcggtcaccgtattgaccagcatggaagccagcgatttgcaggaccttggcatcacgctttctcctgccgatcatgccgctaaactggctgcgctaaccaaacgctgtggtctggacggcgtagtttgttccgcgcaggaagccgcccgctttaagcaggaattagggcaggaatttaagttagtcacgccagggatccgccccacaggtagcgatgcaggcgatcagcgccgaattatgaccccggaacaggcgcagcaggcgggggttgattatatggtcattggccgcccggttacccagtccgccgatccggcggcaacgcttgccagtatcaacgcatcgctgaagcagggggcgtaatgagtgattcaaatagccgcctggtttactccaccgatagcggccgtatcgaagagccgaaagcggcgccgcaacgagcgaagggcgatggcatcgtgcgcattcaacgccagaccagcgggcgcaaaggaaagggcgtctgcctgattaccggcatcgatctggatgacgacgcgttagcgaagctggccgctgagctgaaaaagaaatgcggctgcggcggttcactcaaggagggagtgattgaaattcagggggataaacgcgacttgctgaaatcgctgctggaggccaaagggatgaaagtgaaattagcgggtggctaagataatttctatgaaataaacaacaaggccacggtatttaccgtggccttaattatttgtagatgcgtgagtcagtaactacgaaattattattaatttaatatgcggggtggttatttgccaacctggtggccaatgatgccgccaaccgctgcgccaccaagggtgcccagggtgctgccgtcagttaataccgcgccgcccagtgcgccggcgcctgcgccgattgcggtgttacggtcgcgtttagaccagtgagagcaagcgctcagtgacattactacagtaaccgccagtacggccgcagccatttttttgctcatcgaagtcatcattttattctcctgaataatctattcatggatacaacttcctttaagcatagcaacaggctatgacttacgggttattccatgaaacttaagttgcgcaggtgttgctctaatcacgcaggtgatagtcacttcctgttatatcgctaataataattctacttattttaaaatttaacgtcaggtaaaaaatcttaattgcgggtcggaatactctcagacgcagaagggacgccaacgccattttatcgggcgctggcggaagcgatcaggcggggttaacaatatcgacggttaaaccgctgtcggtgagctgctggcggatagtgtcgtgcaaattattatcggtaatgatgcgattgaaacgggaaatcgggcccagcggatagggatgcacaacgctgaatttcgagctgtcgctcagcacaatagcctcgcactgtttttccagcaccgcattaaccacatcggcgcgcatcatgtcgcggccggtgaagccggtttcgctctgccagccgtcaacgccgataaatgccttgctaaagtgtacctgctgaatgcactggcgggttagcgggccgaccatgctttcactgcgcttctgataaataccgcccagcagaatcacctcgcccggcgtttccttgagtaaatgcgcgatatagctgctcacggtgatgatggtgatatcgccgcgttccgccaatgtgcgagccagaagggcgtttgaactgccattttcgatgaacaccgtctctccggctgccaccagcgacgcggcgcgcgcggcgagttcacgcttaatggcaaagttggtcatcatccgggtttcgacgtcttcactatccagcggtaccgcaaagccgtgggtacggcgcaggtagctttgtttttccagcgaattcagatcctgacgaatagtgacttctgagacaccggtcatcctggccagatcggctacgctcatacggcctttatcgatgaccatttgcaaaatactttgttgtcgggcgttcatagctacatcacagttagaggtctatacggcgcccagcaggccttaaggcgtgctgggggacaggaatgaattagatttcccacggcgctttcgattgccctgagtccttctctggctcgtcgtgagacaacgcctgcagctcggctttgaggatctccagattatggatcgccgagtgataatctccggcaaccagaatatccagcacggtatcgatacgttgggcgagcaggcgggcattcagatcagacatagcattatcctggttacaaaaatgaatgaaatcaatgatgcaaaaaacagttgcaaaagagaagcgaaaaaaacgcacatccttgcgcggctggcgatattcactcaaaacgagaaatgtatggcccctgggcaggggccataaaagcgttacgccgccggacgggcgatgacgctgcgggtttccatacggacttcagcgatagtcacgtcgataacatcggtgactttgtaaacgacttcacctttaatctgtacggttccgttctcctggctgcagaccagttcatcgcgcaccgcgtgcaggaaaggtgccgggataaaggcgacagcgccgttatcgaccaggcgcacgcgcatgccgccgcggctgacatcaatgatttctgccgcgtagcgggtatcggtcccggctttatcattgaggaagcgagcatacagccaatctgcgacgtcgcgttccgccatccggttcagacgacggcgttccgccatctgtacggtgacgtcatcctgcgggcgaccaatggtctcgcctttaatgacggcttttaacagacggtggttgatcatatcgccgtatttacggattggcgaagtccaggtggcgtaagcttccaggccaaggccgaagtgtgggcctggctcgatactgatttcggcgaacgactggaagcggcggatgcggctatcaaggaaacctgaagactgagcatccagttcgcggcgcagtttacagaaaccgtcgagtgtcaggacttcctgcggatcgacgtgtacatcgtgcgtcttcagcagcgcggccagttgctcggtgttagccggatcgaaaccggtgtgcacgttataaacgccaaagcccaggttatcgcgcagcacgcgtgccgcgcagatattagcggcaatcattgactcttcaacgatgcggttggcgatgcggcgcggttcggcaacgatatccagcacttcacctttctcacccaacacgaagcgataatcagggcggtctttgaataccagcgcgtgggtttgacgccattcgctgcggcgctggcagacttcctgcagcagtttgatttgctgcgcgatagcgtcatcagcaggctgccatgagccgatattttccagccagttggagacgtcgtcataagccagtttggctttagattcgatagttgcggcgaagaattcgatattatcttcaatggcgccgtcagccgccagagtcatgcggcaggcgagcaccgggcgcacttcgttggcgcgcagcgagcacaaatcgtcagacagctcgcgcggcaacattgggatattaaagcccggcagatagttggtgaaggcgcggattttcgccgcgttgtccagtttactgccctcggcaatccacgctgtcggatcggcgatagcgacggtcagcagcagtttaccgtcgtccgtgcgctcgacatacagcgcatcgtccatatcttcggtgctggcgctgtcgatggttacgaactcaagcgccgtcagatcgcggcgttccagtccttcatcgagcatctcggtggcaacgccattcggcgcttctttttccaggttatgacgcgccagcgtcacccaccacggcacgaaatgatcgtcgctaaaggtgatgaattgcgttaattcggcatagaaaccgcggtcgcctttcagcggatggcgacgcatttcagccaccgcccagtcaccctgtttgaagtcatgttctacgccgcgcgcggcgcggcaagggatggcgtctttcagcagcggatgatcaggaacgatagacagacgatcgtcttttttctgcactttaccgacaaaacgggtcaggaaaggctcaaccagctcttccggctcggcgctttcacgttctttttcggtatggaccacggcgataatacgatcgccatgcatcacttttttcatttgcggcggcggaatgaagtagcttttttgcgagtcgacttcaaggaagccaaaacctttttccgtacctttaacgaccccttcaacgcgcggagtctgggaatgcaattgctgtttaagctgcgctagcagcgggttgtcctgaaacataattaggttttttcgtggctaaaagagcggctgacatttttacgcgaatatgcctgcctcagcaagcgctgtttcagcattttacgtcgcttgacgtacctcgccgagggcgattttaagccggttcagccacccgcagaggccgcaccacgccagcagatcgatagcctcaacgcgggaaagcccatattcagtgaggggagttagctgcgcggcgctaaaacgatccggcgcacgagtcaatagctgcgccgcctgtaggaaaacgtgttccaaagaatggcttcgcgcccagtgctgaaccgttcgttcatcgccgcgcaatgcctgcaacaatccgttgtcacctgtccagcgagctctccaggcgttaaaacagctgacgctgccgttgattcgcgccgcgagtaacgccgccattgcgcctaagggctgagcagaattatccagttgattcagcagttgatgtagcagggctaacgcgccttcatccgttgccagaaggggggcgagaggctgcaggccgggatgatggtgccatgcggcgagcctggcttgcctgtcatcattggcataacgcaggtcggcatcatcgatatccagggaccactctccagtaacatcagtaaagcgttctgccggggcatcattctgctgcggcataccgggaagccagcgtaccggttggccgagcgcggcctgaaatgcggccaccgcgcgggcctgaaagcccacgaagccgataatttggttaattaacacaatatcgcggctggtcagcccgacctcctcaagctggcggcgggagacctcgttgataaccgaaggagaactggctaactggcgggcgtactgggttatctgcgccaaccggtgattactttctcgtgaggagtcagggccaggcaacggcgccagacgggcggcgtagtggttacacaagcgctgtacgccgtagacctgagcgacggtcaaggcggtgctaagacggtcgtaggcgctgaaggtttgtaatcgggttaccgtgacgttgtccgggaaaaggacctttgtcaactgacgcgcgggcgccagccagccttcatgagggtggctgagatcggctgcgagtggcagatcgagcaaaaaacggtcatcaacgtcagcggcctccgggaccagaggaagaatctcgaccgggctattggttgactgggtctcgtgataccagtggtttttgccatacacgcggcgttgctccatgggcgttccttgttcggtaggtggcgaaccgccgtttcgcggtacctctatgcacaactatcctggcgtaaccctgaagcaggagaaaatattgatacgtactaacaaatagcggattggaataacagaagagaagcgtaagcagagaaaggagagagatcctcctcaccggggtgaggaggatagggaacttatttcagttccagttcgttcatcgcagcgatgctgaaaccgccgtcaacgtgaacgacttcaccggagatgcccgcagacaggttagagcacaggaaggccgcgctgttgccgacgtcttcgatggtgacggtgcgacggatcggggtgaccgcttcgcagtgcgccagcattttacggaaatctttgataccggatgccgccagggtgcggatcggacccgcggagatggcgttcacgcgaataccttccggacccatcgcgttcgccatatagcgtacgttggcttccagagacgcttttgccagacccatcacgttatagttcgggatagcacgctcagcgcccagataggagagggtcagcagcgcggagcccgggttcagcatcgagcggcaagctttcgccatcgccacgaagctgtaagcgctgatgtcgtgggcaattttgaaaccttcgcgggtgacggcattgacgtagtcaccatctaactggtcagccggcgcataaccgatagagtgcacgaaaccatcaaatttcggccatactttttcaagctcagtgaacagcgcggtgatgctttcgtcttcagccacgtcgcactgcagcacaatgttagaacccagcgcagcagcaaactcttctacgcggcctttcagtttttcgttctgataggtgaatgccagttcagccccttcacggtgcattgcttgcgcaataccgtaggcgatggacagtttactggccacgccagtgatcagaatgcgcttaccggaaagaaaacccatagctttaatccttatcgttattgcttatttttactctaacaatcaaacggttaacgttgttatttcaaaataactcaaatttagccgggaattatatcccactgaagaccccttgtgtcacgattttttgtgccgcctatcgcaacgcagcgcgtaatgataaatgcgcttaccccagtatatcactggataatcactacgttttaccgtgagatcacgacgcgttaccgatatttctgcggttaacggcgcacgatcgtggtgagtaacagtagggcgtccgtcgtgagcggcgcgagttcgcccggcgtttgctgatgccagaaaatacccgattgcgcttcacattgccgttcaccaagttgccagcgcccttgtaatacccaagcgacgccttcgtcgccaggagtctgtatatcatcaacgacccgtacctcggcggcggcgcggttgcgcagggtcatgatattaaagtcgagaccgggttcgcggatcccttcgctacgcaagggccactcgccggcaaaagcccagggttgccaaagcgttaaagcgtgatcgatagcttcgcctttcaggcgcagcggctgcccggccagtagagtaatgacccggtcgacgccgggaaagcaggaaaacggaccatcattttgcagggtggcaatgctggctcgccataaaaaaggggcgtcaggagaggggacacagactatctcacgggtctcgcctgcgccatttttccagggcgtgacgggcagagtggatagttggacaggaacgatcatgagcgttacacctcggtttggcgcggtatgcgcaggcgtttatcaacgttattgttatggttttgttactttttgcaatacaaagaatttacatattcatcacaaaaataggatgcgtgcggtgcgggcagttgtcaatgcttgtatatacaggatcggtcagatggggagtgaataaataataatagcgaggtacctatgtcttctttttcatctacagatgggcagtcaaaaaatagtcaggctggattaagtgaaacgcggtcgatcgattacatccccgaacgcgagaggcatgggcatccgtttagccagtttaccctgtggtttggcggcaacctgcaaattaccgctattgtcaccggcgctttagccgtagtgctgggcggcgacgtggtgtggtcgctgataggtcttctcctcggtcaggtgctgggggcggcggtaatgtcgctgcatgcgctgcagggaccacggctgggtttgccgcagatgataatcagccgcgcccagtttggcgtctttggcgcagtagtgccgttggtactggtctgcattatgtatgtcggtttctccgccagcggtaccgtactggcggggcaggcgatggcaaagctgttgaatatcagcaatgtcgctggaatgctgctattcagcgcgattattattgttattgcggtgctgggttataaggtgattcataagctgggtaaactggcgagcattatcggcattctggccttcgtctatatgttcgttaccctgctgatgtcggcggatctcgcggccctggcgcaaaataaccatttctccctgccgatgttcctgctggccgtgtcgctgtcctcgtcgtggcaaatcgcgttttgcccgtatgtgtccgactattcgcgctacctgccacgcaatgtatcggcaacgaaaacgttctgctcggtgtttttcggtaccgtattgggaacccagacatctatgacgctgggggtgtttaccgccgcgattgccggcagcgctttccccggtcatgaagtgagttatctggtgggattgggtaaaagccaggtgatggcgatggttatctactttgctatttgctttggcaagatcaccttcacgacgcttaacgcctacggcagttttatgtctctgaccaccattgtttccggtttccgtcgccagacggtgttgtcgcagaaatgccgcgttgctttcgtcgtcctgatggtcgcggcttcgtgtattatcgcgctgcttagcgaaccggctttcttaaagcacttcacccatttcctgttattcctgctggcctttttcgttccctggagcgccatcagcctgaccgattactacattatttctaaaggcgcggtcgatattccggcgcttagcgatccgcatcagcgctatggtttctggaatttgtatgccattaccatttatatcattggcgtgcttattcaactgccgtttattgagaacccgctgttccatggttcgctgacgtggatattcgccggcaatgatgtgtcatggattatcggctgggtaggtaccggatggttgtattatgcgctgcgccgctttgaccgccgaccattaccggcgcagagtgtgtttccgcagtgataaatagcaggggcggctattatgccgcccctgaaggaaggttaacgctatttaccatcttttcgccaggcgtcggcagtcagcgcctcgccgaaatggccggcgatcagccgcttggtcagttcgtggagcggcgaggcgagcacatcggcggtgctgccgcgttcgaccacttcaccctcatgcatcaccagcacctgatcgctgatatgcttcatcatccccagatgctgggtgacatagatgtaggatattccctgtttttcctgtagttccagcatcaggttgattagctgcgaacgcattgacatatccaacgaggccagcgcctcatcgcagataatcactttcggacgcaggatcaaggcacgagcaagacccaggcgctgcttttgccccggcgccagcatatgcggatagtagctgacgtggtccggtagcaagcccaccatgcgcatcgtctcgataatctgcttttcccgggcttccggttcgagatcggtattgaggcgcagcgggaaatcgaggatttgcgaaatacgctgacgcgggttaagcgaggtcgagggatcctgaaaaatcatgcgaatacgctggctgcggaatgagtagtcgccaaactccagcggatggtcgtcaatcaacagttcgccggtggtcggctcaaccatcccggccagcattttggccagcgttgatttaccggagccgttttcaccaataatcgccagcgtctgacgctcgcgcagggtaaagctcagcggcttcaccgcctctaccgtctgacggtggaaccagccggtgcgatagcgaaaggtcttactcagattgcgaacttccagcaatgtttcgaccatttcactctttctccatgttcagcgggaaatgacaggcgtatagatgattacgcgcgccggtcaaacgcggcgtgacgatacactcgcgttgcgcatagggacaacgcggtcccagccgacagccgatcggcagttgttccagcagcggaatggcgccgggcagggtattcagccggcttttatgcggcattgagctgccgaaatccgggatggcgcgaatcagcgcttgagtgtaggggtgatgagggatggtcaccagctcttcgctcggcgcggtttccaccgtctgcccgcaatacatgacgttaattttatccgcccatttgctgagcatctgcatatcgtgactgatcagcaaaatagtggtgttgttattctggttgagccgggtcaacaggcgaataatctgcgcctgggtggttggctccatggcgttagtgggttcatcagcaatcagcaagcgtggctggttggcaagcgcgatggcgatcatgaccttctgacattcgccgtcggtcagctcgtaggggaagctgcgcataatatctttgtgatctttaattcccacccggtgcagcagttcaatagcgcggcgcttacgccagccaaagcgttgccaccagtggcctttaaaggtccagccggggatattttgcatcaactgcagcccaatacgctcggaaggatcgagacaggattgcggctcctggaagatcatcgatacgttgtggccaatcagttttcggcgctcgcggttagagaggcgcagcagatcgatatcatcaaaacgcatacggtcggcggtgacccgccagttatctttggtgacgccgcaaatcgccttggcgattaagcttttgccggaacctgattcccccaccaggccacggacttcaccttcagccagcgtcaggctgacccgatcgacggcctttacccagccctcgttggttttaaactcaatggtgagattacgaatatccagtaacggcattattgaaccccggcaataattgcgcggcgaataccgtcgcccagcagattgatgagcagtacgcttatcatgatggccgctcccggcagcatgaccgtccagggggcgacgtaaatcagttccagcgcgtcgccgagcatggcgccccattccggagagggtagctgagcgccgaggtcgagaaaaccgagcgcggcaatgtcgaggatcgccatcgacagcgcgcgggttatttcggtgaccagccctgcggtaatattaggcagaaccgcaaaccagagaatattgagcgtggaagcgccgtcaaggcgggcggcaatcacgtactctttttccagttcatcgtgcaccatgctgtagaccgaacgcaccatgcgcggcagcagcgccagccagacggcaaacatcgcatggctcagatgcggcccggcaaaagcgacgacgataatcgccagcagcagcgacggaatcgacagcagggtgtcgagaatgtggttcattaccgctgaacgcaaaccgtgggtggaaccggcaatcacgccaagcaccaggccgaacagcgcggcgccgagcgtgaccacaaaggcgccgccgacggtcggcgccgcgccgctgagcaggcgacttagcacatcgcgaccaagatcgtcggtcccgaggaagaacgacacttcgccgtagcgcgaccatgaaggcggcagcagctggtagccgaggaactgctgatcgatgccatagggcgcaaaccagccgccgaatacgcacagcagcaccagcgcgccgcagccgtataaaccaatcatcgcggtggtatcgccgtagaatttacgccatacggtgcgcaatgcgccgggcgggcgcttttcgagatagacgctatcgtagggcatatgaatccgttttaagtttgttagtcatgctttaagtcttttcaaaaatcccgctaataccaacgccttgccagcatggaacgcttaacttttgtatgttctgcattgatcagaaggttatcaacttccgcaaaatctgtgtgctaatgtgtatatcttcttccggagtgtacacattgcttaccaatacaaaattaagaaaagcttatggcaaaaaagagaccaaatcgctgtcatttcagacgcgcatggcctgattgtcaggttgtctacactcggcagtataacattgttttaccgctacagatggaacgggaaagccgctcagataacgattggcgattatccgaccaccaccttagctcgtgcccgagaacgcagacagcagttcagggcgtggctagcggaagggcttgatcctagacggcaagtagtactcgagaaacagaaaaaagtagaagcgcttacagtgaaagaagcattcgattactgggagaagtactactgcatccatgaaggtctggtaaaaatcaaagttaaccgccgcgatttcaataatcatatagccccagtgctcgggaatatgattgtagatcagacaactaaagcccactggcttaatctttttgacggtatgggacgaagagtggttacagggcaaatgctgggtttgatgcagcgcacatttcgtttctgttccaaccgtggggtaattaacgtgaaccctattgaaagccttagacgatcagatgtagggctcacagcagctgtaaaagatcgcaggttaagtgataatgaaatcattacactttggaatgccctacctgagatgaaatataggcagcaattgataatgaagtttctcattatgactggttgtcgaagtacagagatcagaacagcaaaatgggaatggtttgatttcaaggaacaaacatggactatcccggcaagcgactataaaactgggaagtcggtgagaagggcgcttcctgaggctgtaatacagatgatggtagctgaaaagaacatcagtttcaaaacatgttgtgacgttgtcacgatacaaggggccagaagatgacaggccgccacttcaaccaaacgtggctctgtcctctgcgcagattattgcaaaaacaaggatgaaaccttggtcgcttcatgatctgagaagaacagtggcgacgcgcctttctgaattaggtgcaccaccacatgttgtggaaaagctactagggcatcatatgtctggagtcatggcgcggtataacctccacgattatttggatgatcagcgtcattggcttgctgtttggcaacgtcatcttgagaagttgattggccagcctctggtttaatacccatgttgtcttcccaggcaagaaggtctgacaaacgccatcttttaggactgccatttatttttggcttaggaaacggctgagaaaagtacgatggcatccgggatggtgtgctccagaaatacagtgtgctgcgcgaaattttgtatctggacagaatgtcactggttatcagtatttcatcgtggaaatgagatgcgttattcataaaaggcccttagttacattgtccaggaagatgctgcagcctacgggcgcagctcatggccgtcgccacatagctgcattttctgtttacaacttctacagtgatctttgagccttgaaccaccaccgtataagttctcttcgttttctgtcgcccgttggcaccataaagctcaacgtgtttcgccagtaccgcatcgcacgcctggcgccccataggggagtgtttgcttaggttaatcaatcgtatatacattcctttatcgggagagttgcccctcccaatctggttagccaacgtattccggtttcatgtcgtccagcgtgatacggaactggtcatacagttcatcaccgaggtgtcggcgcgatgaggtcagggtattttctgccttcgcgaataatgctttggcttccggatctcccgggttaggaagtgaatttatggcagcctcaactttgtttcttgcatcaaccatgaagtagcgctgcaccgctttacctttcaattcggtgaagagaacagtacccagcacagctttctctttatccagatcagctctgatggcttttgccgcatcaacagattcggcgcgttctatgcgatcacggaaatcatcagcaagtgaatcaatgctgatacctgtgccctgttcgctggtggtggtgtttgagccgctggtaatctcggctactgacattctttgcaccgcagccggattgatttctcgttctgttcgttgctcaacttcatccgggctataaacacccagaatcacttcagggcagtacaggcgagcccagtatttcacgcccagataagcgatctgctgcttcgggttagaaacccacaatggggaattacaagttacaacacccgagagataaagcggctcaccccaggtgatttctgactcaccgcgtaggatcgcgccgacctgaacaaacagcccgatttcgtcttcatcagtccagcctcgcacccgttcggtaacgttgtatttcccatttttaccgtgtttttccctggtaatttcctgagtccttgtgcaacggtcccagtctccgccgtagcggtaatgaaatcgaccgttgatagcactggaactggcgattaccgcgttgacgagctgggcttcatatccgagtacgccgtttacctgatgcgttttttgcgcgaccgtatagggattcatgccccactgcatagcctgcataatgatggccatgcaatcggctggcttacctgcaaggtgagctggcacagtcacttgtgaatcagccataaggtttgcgaaagcagttagagccgatttacgtcatgcagagtgacccgcttgattcagggaaatttacccgcaggcagctccagaagaagtacaaacacgccattgatttttgtatcaatgatacgaaaataaacagtgagactttggcaaaatttaagagagaaatcgaatcgcgtctgactgataaaaacactgtttaaagagtcacttatcgacgggagaaagactcaaaagtgtattatagccctaaaactgacaatgttgtggtgttggataaaaacggtgattttgtttctggctggcatttggtgccgggctctccacagcatgttaactatattaaaacaggagttctgtaatgagtatgagtttaattgaacttgcaaggaagttagtatcctcacaaatatctgcagatgaatttgaaactcaatttttccaaatgtggagaaaagaaggtatttcggggcagttaacaaaagatagtaaagatgttggagagtgtgcagtcgagctttttattctcgctgattgttatacgtcagaccctgtaagaagagaaagtgagttggattcgtacgggttgtataaagaggttaaagccacccttgagaagtataaacttctatagaacttgagttttgaatggcgtaaatgattgattttaaaagtattatttcagagcaaaatcttgttgatattatcctcttcttggtaaggaaagagaacggcttgggttaccctcaaatggatcgttttttcagtcgtcatatgttttcagtcatagagaacggtgagttcatgaggacatttgaacagatgcgactaaaaggagaagttgaattgggagagaaaatgcttgttgtaaaagggccaaactggaaagagccgagattcgttaccgaaaaaaaatacggtattgaataactcttttcttacacttttttgcactatgtccggtaagttaaaggtaccggacattcatttgtgatctcataaactttcagcaatagcgtgcttcgtttacgttagtgtcattataaacgcaggctgttcggtaaactcccatgctctgtgaaaaatcgaaatacatgatgggttgatgcctgttgagtttcatctcaaaatccattaaatgggtaacgtaatgattaataaaattatttctgattatgccgaagctgaattccttgagtttgtaaaaaaaatatgccgagctgaaggtgcaacggaagaggaagatgacaaattagttgacgagttcgagcggttgactgagcacccagatggctctgacttaatttactatccgcgcgatgatagtccggaaggtatcatgaaggaagtaaaagaatggcgtgcaaaaaatggcaagccaggattcaaggatagctaagcacctaaactgctccataacaatataaaccaggtatgcgggttgagacactgttcgtgttccgcaagctgtcttttaagagaaaattagcatgccaaagactctcactgatgaagagctaaatgttctcatcgaaaaagcacaggcacattcagaagtgatgtctgaattaggttcagaactggaagctgaagagtctggacaaatactaagcgcactatgggaattgaagcggtgctgggaaggagccgccccgtgggaagtggagtgacgaacgactgaacgagaattagcatagatttaaatcaaggcccttaggggccttttattctattataaacggacttcgtttgagagtgacgtcatgaagcctaggaagctaaatgctgagcagcaatacaaattagaccttgagttggtcaaaaagaagcccgctaatcgcaccgaggcaaaagcccatttggcagcgcacttacggattagcaagtataaggtgcaggcctcttccaaaattcgcgttggcaacttcaagggaaggaaaaaggtgcatttcaataaggccgaagaagaagccagagcagcactaaataaagcaaatgccattagattttccgaaggggaggtcgagtccgtcgatacggaccgaatctccgagagtaacaaacgctggcgtgggagaactgctgactaatgtctgattggaatattgctgcaaagcctcaggaagagcgagacaaggttaacgttgacctcactgcttcgggattggcggataaggtgcgcctgaacataccggtcatcgccgaagctgtgatgcgcgagcagcctgagcatttgcggaataactttctcgagtggtttcgtcattatcgtgagcaaagcatctctttgccaaaagtatctaacgctcattatctcaagtaggaggaagataagtgaaattctctcgaatcgaacaaagcccagcaatggacaagggaaactatgtgaaaattgaccatgactttggctactttttagatccgaataagatggcttcgatagctaactatgaagatgagtcagcagcactattaaaattaatgctaattcatgaagactttcttagagttgttattgaaaacttaaggcctgagggttcagaaaagtacaatgccatacaaagctataagtattttgcaccgaagctgtcagctgccgttctcctggggcttcctgtatcgcttgcagatgctatggctgaactcaacagtattcgtaataagtacgctcataaaatagactatgaaattacaaatgaggaggttgataagcttgcggaagtgataaaaaaaataaaaatcgaagaaatcaatctcggcgtctacatacatcaagaggtagatatcattcttaaggatggtatctacgctatagctctgatgagagagctgccaccagatttagaagaaaatcgccttcgtatctgcaagctagttacaagcgcacactgcatgtgtttactgggagcattttggttaattaatactctccacgtcaagggcaaactaaaactctccatgcctgagtaggataaaagtaacgtctctgcacaattgattttccgttatccccggccataatcatgtcatcggagcctgaacaaccccggtgacttctgcgcatttaaggggacttaaatgcgaccacaatctgaattcctcaattcctcacaggtgcagaaatgccccgcgagcggagcgaccagcaccggcggcgtgggcgatgcttccggcccccgacttgctgactccgctgagcggaattatttcacattcagagagcgaattgtcacagtgacgaagcaggttggctatttgcaggactatatcaatactcagtgctttaattaacacccttactaaactttgttatcttatggtaattatgattttttaatgcaagacatattaaggatgatctaaatggcagattatagaataaaagccgctgggagtcatagcgcagccttgggaaaagtaattgacaaggtgtgaaattacttcagaaaaagtaaacaaagatgtgctggttttagtgtctcacatcaactatgcgaaagatgatgaaagaatcgagcaaatctttggcggggttatgttcgatttattgataaaaaaagagaaaacaccgtcggcgttggagatgttaattttgagttgcagagcttcagttacttaacaaatgctccttatcgcgcatatggacgaactgttattgttttaaaccccaccacaaaacaattgaacaattttttgcaggacggaaatacttcggtcgattggatagctgtagaaatgactttagatggagaactcgatagttgggtgcaggtaaaccaagctgccgatatttgaacctataactattcaagccgcatccgggcggtttttttgttgccatcactgtgagaagactaattataatggcaaccataaattactgctgtttgaattctgattcgaactcagcaataagctgattgactctgtctgtatgggatggatacgatgacaagaactcttcctctgtctgtacttcattctcctgtcgatatggctctgtcgacaattggagtacgctggctagcctgaggctggctcaactatctcactgctgttgctcgatggtgagcattcagcgcgcagtaaggggctgcgctgagataagagcctgcattacagaggtcattccatagattggcttcgataatgggtagttcaatgcacatcattttgctggtaggattactctgaaaaggagtaattatgagcctactgaagaaaattaaagacgccgtttctcctcccgttccggaagagtgtcgagaagagagttacgattcggtcctgaaaaaccttgataccctgtccaaagaatcatctgaactgaaagccctgatggctgagttcggtgaaggaaaaataactcaggagcagtgcattgccactggcgtagcgattgtcaccaaagaattactcgaattccgctacgtccaaaacaagattgattctcaggcctggtaatcttctaaggccgacagcaaagcaacatataaccaccaatacaaaggccacctccgggtggcttttttaatggttgttaccacaggaaaataccatggcaaaaccggactggggcgagcttcagaacggcgatgatctggtgttcagtgaatcgggctttacgcatggtgatctcctcagggtacataatcagtatgtcggaagatctataaaagtgaatgggccgttttgccgggatacttacatttggggtttgggactggcgttcagaacgttagcagcgacaacagccggcgaaccactgttcatgcgccgattacccaagagtttaaccttcaagggggcacgcctgagcaacttaattctacgctcaaccagaataacagacagctttccaggcagttgaaaggggagcttgcaaaggaggttatcacgccacaaggagcttttggcaacgctcttaaaggaaactatactcgacacggtccaaggtaagttaaactgcgttatctgggacttgattagacaggtaaatctaacaatctgggtaagtgcaggaaaacacaaggatcttatttatggaagcgttatttacatttaaagactttattgcttttacgtcccctctttttgtaggatggcttatcttcaatagaagacgcaaacgtaaggaagtcagagtcaatttttcatttctttggcttgttttaatagtgggatcctttttggagatatacgatgagatttatacgacatattcctacaggcataatcatctatataacaatgatacactaacaacagtggttaattatgattttgctagggttgttttttttgtggttttaattgttgtgtctatggtgctttttattcaggaagtaattataaaaaagaagtcgcgttaaagtatgtcagttgacggcacatcaattcttgttaagtaagatgagaacctttgccgaaaaatgccagagaaaatccaaactaatactattgaatagttggcagttctggcattttaaatttcaagcagttctgagtacaaatggataattttgttgcctcgttctatcatttgttacgaatcaaattcatgcacattcactattgtcttaaaaaaaacatagacttattccgctccatcacacttgattcaaactataattccctccgaggttaacggtgaaattttattcatgatgcgctcttgggaggaggtatggataacatctattatccacacgactatctccctatgcctttatcgatatcgccatcccggccagaaacagcgacggtacacaggatttgcagttcgctatcagcaacatcaacggagaggtgagtacggctattcgtgatgcgctggccagcctgacaaacgcctctctgacatacaggcaatatctctctacggatttgaatgccccggctttcgtgccgtatacgcttgctatcaaatcgggctcatggacggcactgcaggcacaaatcacagccggctatatgaacgttctcgataccgcctggccgagattccgttacacccttaatgagtatcccggcctccgttacatgagttgaggtttccccatgtttgaacctgataaatacctttcggtcacatggctgaagggcggcagagtgtatccgcaactcgactgctttggcatcgtaaatgagatacgacgcgaccttggattacccgaatggccagactttgcaggtgtgaccaaagatggcggcggccttgataaagaagccagaaagctgatgttgaagcttgagcgttgtgaaccatgcgtcggcgctggcgtggcgtgttattcgggaacaatggtcacccatgtggggattgttgttgagctaaacgggttggtgactatcatcgcgccgaccaactacctgatctcatcttcatcgggttacagcgtcctgttcagtgacacgctgactaagattaacccctatgccggcatgcccgttacgctggaaattaacggggcagaatatgatctcttcatcgctacgttcacgccaaagcaggatgctgttccgggcgtggggggatcggcagcttcattgcgcggcagtgcagccccaacaacctatgatttttcgaccagcagccagacgtttaccctgacctggcaggcgactacttacaccgtttcgctgatcgctaactacggcaatatgtctggcctgctggcggcaatcaatgaagcgatctccgggtcgaacttggtcgctcaggatgatggcggggtagttcgcatcgttgagaagtccagtccgtggctgggcggaagtattaccgcctcatcacttccggtttccgttttcggggatagtccagtttttaccgatggtaccgcatccagcggcggcagcccggcgatcaccgccaatgtcactcttgcttatgggagtggaagcggcgcggcattttccggcattcctgaagaggcaatttcatgagctaattattcaccagactgtctttcgatgtgccattcgataatccaacgtatgttgatgaaagctcagtgcgccgcctcattaatccggaatttaatccggagtctggttttgtaaactggatgtttggtggggggggctgacagcctcacgtcactgtccggcggtcatgttatgacgccgtcggctggtgctttgccaacctataaaaactcatcgcttgttctgcctgctgtagtgacgggttttaacggcctcagcactgaatatcatgactcaaacagcatgacactggccgctgtcattcaatataccggcgccgcaacacagatccttctcggggtaaataccggaacacaaggggagtgtatctttatgagcggcaccagtgtgatgacccaccttgtgcgcaatgcgcagggggcatcagtgacaactgaaattccggtgccggccggactcactgcaggaaagtatattttcttggcgttcagtcgaaacggaaacaacctgatttcaatggtaggcggtgcatccacgcaagtgaatctgacggattccgttaaaaccccggcaacagcggcgaaggttgggcctggcaacacggcatataacaccaatggtttttcaaaacagttagaggtgattgagtgcctgtatcggtatggcccaacaacgctcgcagatcttcagacagcctatgctaatgccaaaacccgctgcgcactccgcggcatttctcttctctaacctgatgggagtcgtaggcatggaagcctactttttcctggaaagaaggtccttaatcttaggccatgtccattggtattcggcatgaagccacaatccaatcataacgcatgctgacacgaacataatatctggccatttagtgaatccggtagtgatggatgccaccgaaacgatgccagccagtcttgtcagccagtggctacgaagaaaagaatcaaatccgtcgcttttattattcatccgtttaggtttcgtttaagttgcttgtggaatatgtcaagtaagaatgatctgaaattttaaggatgttatcatcattttctcttctggttcatgtttatctttcgtgtcaaaagatggacataaccaaatcaatcgagagtcgcggggggcatccagctagaggcaacatattgatttccggaaagcgggtctacttttaccggttaataaatcgtcatctataaagaccaccttatttaaggggttgacggtcataaatacgattttcactgctacgcagatcaccatacaagttggccagttagtttttttgcttctttgaagatgactaaaacaccggctctgatcgatggtgagacacgcggatgtgtctataactcaagtgggacagcacctgatgtgcatgcatatgcatactcaaatatgcctcctttttatgcaaatgcaacagatgataagcctgctgtgtaaaattgacggataattcctatgtgatatagtgctggtcctggtataaaattgggtgaggaggattgaatgccagcatgatagacgaataatatcctcaccataactatttgcaccatagatatattatttgccgtggtgttattgtgaggattacacacattgagaagtaaatttaaatacgatgatattgccataaggttatatctattcgcacttgcgataattacactagtgccttttggtcgtggtagtatttctggattagagccagcaattccatttattttcatttcatttgctgtttttgcaatgacaaggaaggttatcgacaaaaagaaattatctgttttgtttatgttcttcctttgggcgtcgtggattgttgcaggtattgcttatagctatttaacctacgataaactggcagatcatgagtcgtcatttcttcgatatgtcagacttcttgaaatgtacttcccagcgcttttggttttcgcgtttattaacaaactaaccgaagaacaaaagaaaacagtctatcgcttttttatttttctcttctttgttgtaacaatagaggcggcatggggttggttcatgcaaatggacattcttgtcgcgaagcaaagatttagctatccaggaatggggtacatttacagggctggtggggttgctaatgattccagcgcgtatggtagcttggcgttaattcttggtgtcgcatcccttatagggcttcgccataccagcaaaagtaaaatactttacctcttgatactccttggcctgatatttaacatttatatatcactaacgcgaacgcttgtttttgcgctggcggtatatgtattctttgatttaattagaacaagaagccttagcgtattcaagatgttattcttcgcggctatcggtgctggggttatcatttacggtatcagtaacgattatatcatagccttgttggacaggatcaccggttctggacagattgatatcacgtctggacgacttgctacctgggttgccgttcctgatattcttggggaaaacccaatatttggtgttggttaccgtatggctacggacaagtacggcattgtgcctgataatgtgttcatttcatcaatactggaaacaggtgttgttggtttgtttttatacatggggatgcttatagcgctgtgctactgcgtgtacaaaaataattcagaaagcttacctcttatcctggcgtttatagcctcagggatgtttgttgatatctcgacgttctggattagtatccctgctttaatcttctttgtagctgtaaacagtcagcgcgatgatgatgaggatcgccatcgcgccatagaatagcctattctattttattcagtttcattagtgtagtaatcggtgcttttcctggggtggagatgtccgcctcaggagcacttataacatttcgcgctgcattagtattcatcaaggctataacccttccagaattctcacccttgatatttcttatgatgttaaatttagagtatacagacaatacaatgtcgcaatttgaacctttaatgttctttatcatattcggtttaaattctttttgagtatctttgaatttaaagaatgttgacacggcttttttcgcattgccgatatttatgttctgaatcaaacaaccagaagaattgtttataagaacaccctcagaggtttgagttcttccaaggtcaggaatatctatgtctgaaatgatgcaatcctcgcaaaagttcaacgctacgccactgccgtttttacttccctctgacattggttttagttgttttgcattttgaatcgtgcaattgctagagttagccataaaccctatcgagtaatatgtcctgaccatgtctggctctagaacatacaagtttttcgcgctgcaattatggtttgaaggtgtttctggtggagtgtcagaacccattccaataagttgcgtccatcctttcccccagatgttgctagcatggcagtcaatggcgtttacgaaattaattccgtaccctccccagctgctttctgagcctgcggtgaatctcgcctctagatagatatcgtgtaggctacttcctttcgcctgagccaactctggtgtgtcgcgtatatagtgccgttgaacaggattcttgaagttgttattgattgtagtcgacagcgatttgttactaaaccgagttaacgctaggtctctgtttgcctccaggcttgagccgatgacgaaaccaccacgtcctttactgaacaccggattctcgaaaacaatccgcgtatccttaccgtcgccatatgcttcagtattgttaaagataaataccgggaacctcagcaaatattcttttttgggcggagggaagtataccgttccgccaccggcctcatttgctttaaggaatgctttttgaaacgcaaaagagtcgtcagtcactccgtcccctttggctccaaagtcggtaacgctgaatcttgacgctcctgatgcaaatgcaatttttggtagggacgccataagagctgcgcctatgcctagtctgaatgccatatctatggcatctctcctactgtaacttttcatggccatcctcaaatgcaacttatgattaccgaacctttacacggtgctgggtatgaggcaataagaaaacgtatagtaatcagtatggataatccatttcgtaaaagctgatcttgatctttactatttgtaaaatcactgtatataaaaacagcaccctcggagaggataggatcatgtatctacagcagcccatctacgaagctacgggtataagccagtttaaaacgttcgttgatacgcagcgcggagtcgctgtggttgagcgatcttaagcgccgttagcagcatcggttttgcttatttcatatttcggggtgcagcaatttgccaaatttattggcggatcactgattacagaggacggcgactctattgaaggggatgcgctctctgatgtagagttgattggtgtggtcactcacatcatcagtaaagcaggttttgatgacagcccggtgatgtaatgtttgctctggttgatgtgaacagcttccatgcgaggtgcgaaaccattttcagaccggatctgcgaggtaagccggttgtcgtattgtccaataacgatgggtgcgtgatagcgcgttcagccgaagccaagaagcttggtattaagatgggggatccgtacttcaaatgcaaagacctgtttcggcggcaaggtgtggtttgcttcagttcaaactatgaactctacgcggacatgagcaatcgagtcatgacgacactggaggaaatgtgtcccagagttgaaatctacagtatcgatgaggctttttgcgatctcactggtgtgcgtaattgccgtgtgctggaagagttcgggcatgagctgaaagatacggtctaccgcaatacccggcttccggtcggggtgggtataacacaaacaaagacgctggcaaaactcgccaatcatgcggcgaagacatggaaagccactggcggagtagttgacctgtcgaatgtggaaaggcagcgcaaactgatggctttacttccggtggatgaggtgtggggtgttccgccgtatcagcaaaaagcttgaggccatggggataaaaaccgtcctgcagctagctgatacggatatccgctttatccgcaaacactttaacgtggtgcttgagagaactgtccgggagcttcgcggcgagccgtgtcttgaactggaagagtttgcgccagtgaaacaggaaattgtctgcagccggtcgttcggggagcgcattaccacctatgaacaaatgcgccaggctatctgttcatatgcggccagaggcgcagagaaacttcgtggtgagcatcagtactgtcgttatatctcccctttgtgaagacatctccctttgcgctgaacgaaaaatactacggcaacagcggatccattaagttactgacgcccacgcaggatagccgtgatatcatcaatgccgcggtaaagtgtcttgatgcgatatggggcgacgggcaccggtaccagaaagcggggagcatactcggtgatttctatagccagggtgtcgcgcagctgaacctttttgatgacaatgcgccacggcagaatagcgagaaactgatggaagttctcgaccatctcaacgcaaaggacggaaggggaactctctattttgcagggcaggggatccagaccgcctggcagatgaagagagaaatgctttcgcctcgatacaccacaagatacagtgatttgctcgaagtcaggtgattcaatcctttaattttgaaatgtgttcttgctggctctgtagctcgaggagtcagctttgagcgaggagtgggcatttggataaatggtttatcatttgaaagtccatgaaatcggccggtctcttcagggcgacattatcaatatgcgtaaagaacaacggcaggcgttaagcccaccgtaactcaccggaaaagtcatccaccgaatcgctccacttatgtccggacacagaccaaaccttgttaatcgggggtgggtatccgcttctgcagtacccattttttcccacgaaatcgaacactgcatgcggatatccgttgataaggagcacacacttctgactgtcttcagaccagccgattttaacgtcagaaggtatgtggccgtctgaaatatcctcgacattgtagatatgcactgcatcaagaatcgggtttacttctacggactcatcgagcgcatagaaatacccggtccggccgtcgtcttcaaatacggctgcgagcatcccctcaggtgccaagctttttatcacctgtgcttctcccacaatgagctgagcctgtagcgtcactaaaattgtcatacagatgactctcctttccctgattgtttggtaaggctactttcaaactgacaagcaatctaccataacatccctgcgatgaatttccccctgacctgcaggcattttgttgaaaaacgactattttagaaaagtctgcatctggcacaaagcatacagtccagttgagaacacagggtcaatattgtcccgcctttagggggccgcttgggaaacggaaattatcctacgttaagcctgttttttgagctggcatgacgggcagctatgagtgattaacagacattgctaactgcattctgtgtagttcaacggggagcaggtcatcatatcaaagtgagttatgtgggaatgcaaaggtgggggtagtgacttttttaatgaaattgattagatttgaattatacaaaggaaacttaaaatggatgagtttatgactcaaaaagatgaagttatgagagctagtttactctcttataaaaactgtaagctatttcaaactaagagtgatgtgttcggaatatctgaattcataatttattccgatagtagattcacaaatgaagctaaaggggattttgtttattccttcctaaatatgctccctttagaagatgttggtgtaaaaccgaccttaacggtgagagtcttgtctgctttagacccggcaaggttgtcttttatggatgaaaagccacatacggatgactttcatggcggttggcttagtgatgaaattgcagctttggttagcttgaaattaggcgtaagagcacacgcaggctcaactgttagagaatatagtagttatacacctgaatatggccacccgagagcagagcaaaaccctccaccacctttaatgttaaaaggatcatttgtagttccttcagcaaaaaaacatattgaaatttcacagttgaaattattaaacgatatttacaagctctcagaaaaggattttaaatcactaattaagtcagctcgaaatttccaagatagcctttggatttgtgaatcgtcaccaaatctagcttggttattaatggtttcagcattagaagtggctgctggaaactgggactctaacaagggcgataaggttgaaagattcaaagcctccaaaccagagttgtttgatagattattgggccataatgttgacgggctaattgaagatatcgctaaacaatttgaaggaacatttggagcaacgaagaaattttgtgacttttgcgtcaatttccttcctgatgccccaccaataagaccggagagtggaaaaatagaatgggaggagaaaaatttactcaaaatatttaaatccatatatggattgcgctcattagcgcttcatgctggaaaacctttcccccaacctatgtgttctccaccggacaactattcgggattagctgaacaagcagtatgcccacctacctccaattttactccattgaaatcaaccctgggagcctcatggtctcataaggaagcccctataaatctcaatgtatttttccatatgactcattcgattctaaataaatggtgggagagtctttacttaaagaaataatttgccatttcggttaaaaccccttgagaaaagcggttcacttttaacctgttttcgacacgaatctttgaatgcagtcaaccattggtgagtgaccgacataattgcgatagctaaagaggcattgccggagtcttgcttagtcatcatctcccattaaattcttccagcaaccagatggtcgtgggggcgctccagctaaagctgtacgagtgccctaaaatacttgggtagtcagctatcagtgcatatgttcattcacagagaatgtccgctcctggcacatttcggacgttatcaatttataggtgctcaatagcctcgattagttcggcgccctgattcttcacatttcctacggcgcgcgtcactgcgtgccagattaacttgtctgcgggcaccgtaccgtccgcagctatttcttcggcttcctttcctcctacatcctgtctcatccattccctggctgcttctggtgaaagtaccagcggccggcggtcgtgaatatctaccagaccattatcagctgctgcagtgacgatcagaaagccttctgcttcatctccgcgttcaaatggtgtgcttccgattgctgccatgaatatcggttggccatcggcacgatggatgaagtagggctgcttcttatcgccttccttcttccattcgaaccatccatcagcaaagcaaatcgcccggccatgttgccatagcggcttaaacatcctgctggtggccgcggtttctactcgagcattaatcagcggtggtttatcccaccatcccggggcgtaaccccagtgtactggatcgagatgcaactgctcgtcgcgttcgctcaggagcaaaacctttgtccctggcgccacgttgtaccggccgattggttcgggttcataagcgatatcccgctcagcctcttcagccaaataagccaggtactcttcacgggtttgtgattgagcaaagcgtccgcacatggttacctccagtttgtagactgaaagtatagaatgtgtggaggagtaggaagggaactccgacagcaatcaaactgatgactgtcggagctgacgttaaaaacaacgtgtacaaaattgtgtattaaattcaggggaatcgaataattttaaaatttaactaattgtttttaatagataaagtcgttttctttgtaggtgctatcgtagggcataccattccttatgtttcagtgggttagccatggctcctaaaatatccgagatcacgttgacgataatgaccagcgcgccgatcaccatcactccggcggaaatcgctgcgtaatcctgttggcggatggcgttgatcagccagcgccccagtcccggccagctgaagaccatttcggtaatcattgccagcgttagcatggtggagaactgcagtcccaggcgcgggatcaccggcggcagggcattgtgcaacacgtgacgatgcagaatcgtcctgcgggtaacgccgcgggtcgccgccgctttaacatagttagtatcgtagacttcactggtgctgatacgcatcaggcgaatcacttcggtggtcggcgcgacggccagggtcaacaccggcagcaccatatgccgcgcggcgctgacgatcatctcatggcgccacggcgaatcagagagccaggcgtcgatgagcgcgaagccggtcaccgttttcacttcgtacaacagatcaaagcggccggagacgggcaaccaacccagcgttaacgagaagaacagggtaaatagcaacgccagccagaacaccggaatggagaaccccaccagcgccagggcgctaatgagcgtgtccggccatttattacgcataattccggcaatcatccccacgggaatgccgaccagcagcgcaaaaccaaacgccagaatgcacagttccatcgtggcagggaagaccaccttcagctgttcggaaatcagctggccgttgatgctggagacgccaaagtcccagtgcagaacccctttgaaccagaacagccaggcattccatagcgatgcgccctgcagcggcgcgtgcggcgtaaagtagctgaggctaaagccgataaaggtgaggaaaaacagcgtcacaagtaacaacagcaggcggcgcagggtaaaaataatcatggttttttcacctcttctttttcgcgcgacacgcctgcgaaggaggcgttgccaaacggactcagcaccagtcctttcatatcatagcgataagcctgcagacgcagcgaagaggccagcggcagcaccgggagatcgcgggcgagaatatgctgcgcctctttgtaggcttcgatacgcgacgccagctgttgtgaaatcagcgctttttgtaatacctcgtcaaactcgcggttgcaccagtgggcgaggttggtctgagaaccaatcgccgcgcagcttaacagcgggcggaagaagctatccgggtcattactgtcggtggcccagccggaaagcgttaaatcgtggctcatgtccatcaatcgcgcctcctggaaacgaccttctacaggaataataatcactttgacacccacctgcgccatatccgcctgtatcagctcggcggttttcaatgggctggggttccacgcctgggaactggtcggcacccacaattttagcgtgagattactgagacccagcgtctgcaggcgacggcgcgcctccgcggggttgtattcggtaattttagcgtcgttatcataagcccacgaggcgcgtggtagcattgaggccgcggtttccgcggtgccgtagtagatcgattgcatcagacgctggttgttgatcgccagcgccagcgcgtggcgaacttccggattatccagcggcggtttagcggtgttaaaagccagccaggcgatattcatacccgggcgcagcgtcagacgcaggcgcggatcgtcgcgcaggatggtgagctggctggcggcgggccaggccagcacgtcgcattcgccggttagcagttttgacagacggccggtgccgccggaaccgagatccaccaccacctgcggcatcaagggtttgccgcgccagtaggccgcgtggcgctgcaggcggatatactgcccggtgcgatactcttccaatttaaacgggccggtaccgacgggctggcggtcgagttgttcttcgcggtcgcttttggtcagctgcgcggcatactccgccgacatgactgaagcatagtgtgttgccaggtgccacaggaatgaggcatccgggcgtttcaagcgaaactcgacggtatggttatccagcttacgaacgctttctacggtgtcggcgaactgcaggctatcgaaataggggaagctactgccgttgacgctgtgccacgggtcgtcgcgattaaagatgcgcccgaaggtgaagatgacatcatcagcgttaaaagcgcgggtcggtttaaaccagtcggtagtctggaactggaccttatcgcgcaggtggaagcggtaggtggcgccgttatcaagcacttcccagctttccgccagttcaggcaccagacgataggtataagggtcgacgtcgagcaggcgatcgtagatctgggcggcgagggtgtcgacaatcaggccgctgctgactttttgcgggttaaaggtatttacctgcccgctgacgcaatagacaaacccgctatcgcggatatcggcattagccggcagagccggggccggtgcggcaaaagcctgcccgcacagcatcgaggctgccgctaaaagagaggacaatttcaggcgcatattttctttttgatcatagagcagagctctatcttattaatattaaatgacatttaccaccacctttacgacatcgagggggataatgcggtcaccggcagcgcatgttgtccagccagttggtcaaaatagtgtcggaaataaaccagtattaagaaacatggtatctttttattgccgatttctccagttagccatctgtatgcgttctgtagaggggaggtgtgaattgcgggatcagagcggaaggagttgattatagcgggcgatataatcctttggcgtgatctccagttctccgccgtcgcgatggatagcgacaaaggtacgcagcaccagtccgcttttacgttctgatatttcccatccttgttcgctgtaagcatcgcgcgtggagcgcacgcagagatccgagaaaatcatcattaaagagagggctggggcatgatgatttttcatggtgtggatcaaactggcatgggcggcatagcgggttagcgtatgagaattaaccggaatcacgtgaattttcagtccattgaatataattgccgccgatgataattcacattaagacatcttaccagttacatattattaactcctcgcgttttcatacatgaaatgatagtgacgttgtcacgcttcaatcatccagcggtgtgaattcatataatgccagcgcattgctctgcagtgaatccacccgaagccagccatcatccatcagttcctcatgcacgctcagcgccgggcgggcgtggtgctggagccagcgataatcttcttcgtccgggccgctgcggctgcggaatgcctcaaacagcggaaatagcgcgccgtgatgttgatcgaacagatgctgtttgatgcgccagcgtccctccagcccttcaagccgcagggtataaggctggcgaaaccgctgagtaaaggcctcttcgctcgacagccaggggttgaaaatcaccgtattgcgcagcagcaactggtagtgtccgttatggcgcaataacaacaggtttttgtcattgattaagacttcgccgcgcagacgccgccacagccataatacccagtaaaccgggcgcggcagaccatgcaggtaatgcagcgccaggctggaggtgtcaagtttaccgttgtcccgcgcctccccctgcagcccggaattaagccagaagccggccagccacacctgttcggcaatgcccagcaggttatccatcaatagcgcgccgcggaaaaaacgtccgttggtatcgcgggtatcgccggtcaacgtattccacgatagcagccacagcggcaacgagagctgccgttgccgtagggcattatgtatttggcgtaatttctgtcgtggatagctttcactggcggccagcttgctgctatcggcctgcgccaggtcaagcagttcattagcatccgcctgacaggcgagaaaatcggcttcgctgagcagcggggaatgcagtagcggatcgtcggcaatatcgctttgcgggaaacgatgccagatccccatttgcggttgttgcaaggtggacgcgagcacttcgcgctgttgtcgccaggcctgctgtcgcgccgcttcactggcctgcggcgaccagtgccagacaaaacgccagctcgcaagcgtcgtgggtgaaaagtgattggcggcaagttgcagaaaacgctgtagtaaatcgcagcgggtggttaaaccggtgtggagtagcaccgtccagcctttctgcgccagccagctaaacagctgctgaagattgtaccaacaggcataacccgcgagcgtcgggtcgtcccagccttcgccaaacaggcggctactgagaaacggatcgtgaatatcaatgccgtagacgggtagcgtctgctgcagttgctccagctcgcggcggacatcttcgcggagtaaatcatcaagttcgcgaacggtgacgatcgtacgggtatggcgcaataacggcgcgcgcgctggcaactggcggatatccaccagcctggtctgacgcgggttgagcagcagcggcggcgtattatcgctgtttttttccgcctcattcaggcgggcgtaaagtcgctcaaccgcgaccggatgccagacttcgctggcgctgactcgtgggcggacggcgggctgcggctgctgttggcgaaattgccgcggtgtgacgccatgctggcgcttaaacagatcgctcataatgcgggcactggcgaaaccgttgtcctgcgccacctgctgaaccgagcggcgggtggccagcagttgctcggcggctttgccgagacgcagggcggtaatgtactgcacgaagctgacgccgacctctttatgaaacaggcgggaaagccaggcctccgagacaaactcagcggcggccacttcctgcagcgagatccgccgctgatagttggcttcaatgcgcgctactacgttgataattcgtcggctccagttttcggcgccgcggcgcaggctgggtacgatgggctgcgtaaagcgggtcgccagcagcagggcgatttcgctgagccagcggttggcctctaagcggtaacgcgactgatgattaaccagcccggctaccagcaactggcgcatcagctggcgcaggttatctgccgcatccatgttttcgccgttaacccgaaaatcacaggcaaaaaaatcgctatcaaggcgggtgagccaaccagcggcaaggttgaggatcatgaccgcattggcctcttcgccggtaatctgccagcgctggcggcggttaacgatcgccagttcatcaacccgcatcggttgcggcgcttcgccgagttgcaaccgcgcgctgccttccagtagccacagcagcgttaatccgtcgctttccggcgggctgaggtggcgaatatcgcgcaccgttaggctgaaatcgccgagatggtgttccatgcgccgctccttaaaagacaaaaaataacagggtgttttttgtcataacagaattgtatagaaaacagtcattgataattcgtcaatataaaacaaaaaagcgcattttaaagccgggtggggcgcataaactcgaaagtgtcgtgcaaacacaacacaggaataataaaaatgacacatccattgattgaatctttgcaagttaatgaagcgcagtttgtggcgttacgtcgccgcttccaccaacagcccgagattggctttgaagaacataaaaccagcgatgaagtcgccaggctgcttgctgagtgggggtatgaagtgcatcgcggcctcgccggtaccggcgtggtcgggacactgaaagtcggcagcggcgaaaaacgtctgggtctacgcgcggatatggatgcgctgccgatgcaggaaatgagcggtaaagcatgggcaagccaggtcgacgggcgttttcacggctgcggccatgacggtcacaccaccacgctgctgtatgcggcggaatatctggcgcgcacgcgtcagtttaacggtacgctgcagttaattttccaaccggcagaagagctgctgtacggcggacgggtgatggtcgaagatggcctgttcacaaaattcccctgcgatgccatctttggcctgcataacatgccgggccagaagctgggcaaaatcggcctgcgcgacggcgcgatgatggcctcttccgatacgctgcatatcgaagtgaagggcgttggcggccatggcgcggtaccggaacataccgtcgacgcgacgctggttgcctgccacattaccctcgcgctgcaatcgatcgtttcacgcaacatcacgccatttgaacctgcggtagtcaccgtcggcagcattcaggctggtcacgcgccgaacatcatcaacgataaggtattgatgaagctgacggtccgtacccttaaccagcaggtgcgcgaaaccgtgctgcagcgcattcacgatattgcggtcgctcaggcggaaagttttaacgccagcgctaccttgacccacgtcaacggcagcccggtattgcgtaacgatccggcggctaatgagctggtccgtgaagtggcgacctcgctgtttggcaaagaacaggttggtaccgtgaatccatttatgggcagcgaagatttcgccttcatgctggagagcaatcccaacggctgctacttcactatcggcgcgggtgatgaagccgaccgctgcatggtgcataacccgggatacgattttaacgatcaaatcctgcttaccggcgcagcgctgtggtgcggcctgacggaacgctatctgcgttaacctatcgcgacggggggacccgattatgagttctgtatcgttaagcgaatctcgtttcgtcggtagcgatcgcctgctggcgggtattgtgctcagcgtgctgacgttctggctgtttgcgcaatcggttatcaatgttgttccggcgatgaaaagcagcctcgatatttcactggagacgctaaccctggcggtgagtctcagcgccttatttagcggctgcttcgtggtggccagcggcgggctggcggataaattcggcagggtgcggatgacctatctcggcctggcgttgagtattatcggcagcgcgtttctggcggcgtcgcaggggccggggctatttatcaccggccgtatcctgcaggggctctcggcggcctgcattatgccggcgacgctggcgctgattaaaacctggtatgaaggtagggcgcggcagcgggcggtgagtttctgggtcattggttcctggggcggcagcgggctttgctcgtttgtcggcggcgcgattgccaccggtcttggctggcggtggatcttcgtgttctcgattgcggtggcgctgctggcgttgctgctgctgcgcggcacgccggagagtcgaagcgccagcgccgatcggcataagctggatgtgggcggattattaagcctgatcgcgtcgctggtgctgcttaatctgtttatcagcaagggccatcaatggggctggagcagtggcttatcgctgtcgatgctgggcggcgcggtaattacgggtggtttgtttatccgtagcggtttgcataaaggtgaagcggcgctgatcgacttcgctttatttcgcaaccgggcctacggcgcggcggtgctgtcgaacttcatgcttaatggcgctatcggcaccatgatgatcaccagcatctggctgcagcaggggcatcatcttaccccgctggaaaccggcatgatgacgctggggtatctggtgacggtactggcgatgattcgcgtcggggaaaagttgctccagcgctacggcgcgcggttgccgatgatgaccgggccggtcttcaccgccatcggcattttgctgatctcctgtaccttccttgataagtcgctgtatatcgggaccgtcttcttcagcaatattctgtttggcctcgggctcggctgttacgccacaccttcgaccgataccgccgtcgccaatgcgccggagaacaagatcggcgtcgcgtcaggggtttataagatgggaagctcgcttggcggcgcgatgggtattgccgtgacggcgtcacttttcgcgctgttcctgccgttgggaatggccagcgccgcacaatacgcgttgtggtttaacgccgcgctgtgtttaggctcaatggtggtgagcgcgacgatgctgccgcgcgccgctcatagctgatgcttcttcaacaaggcgcgtagctggtggtaggttagccccagcagctccgctgactgcttttgattgtacttcgcctgctgcaggctcaactgcagcaggcttttttcttgctccagctgaaaggcgcgcaggtccagcggcaacgcgggaagcgcatgttcaatgaccggtgcaggcgcaggcgtcgcgctgttaaatgggttgataatgatattatccagctcgctttcactgctgccgtgacggtaaaccgaacgttcaaccacatttttcagctcacgaatattccccggccagcggtatgcgagcagcgtgtcgacggctcgctcgctaaagccgggaaacagaggaagccccagttcgcggcacatctgaatggcaaactggttggcaagcagcatgatgtcgctctggcgctcgcgcaatggcggtagttgcacgacatcaaacgccagccggtcgagcaggtcggcgcggaaatgaccttcctcgaccattttgggcagatcggcgttggtggcgcacaccagccgtacgttaacctgcagcggctggctgccgccgacgcgttccagttcgccgtattcaattacccgcagcaatttttcctgcaccagcatcggagcggtggccagctcatcgagaaacagcgtgccgccgtcggcacgttcaaagcgccccgaatgtcgtttgctggcgccggtaaaggcgccggcttcatgaccgaacaattcggaatcgagaaggttttcattcagcgccgcgcaattcagcgaaataaacggtccctgccagcgcgaagagagaaagtgcagtcggttggcaatgagctctttgccggtcccgcgctcgccgatcaccagcaccggtttatccagcggtgccagctgcgagacctgttcgagcacctccagaaagctgttagcctcgcccagcaggttatccttgtattccgccatgatgaatttcgccattaagtagtgtgattcgccaactcactgtagcaagcaggcggccatatctcaaccaccttgtttaaaatcaataagataaaaagttggcacgccatttgtattaactactgcacaggccgctgcctgctatcagaactatgaggattgaaattatgggtattttttctcgctttgccgacatcgtgaacgccaacatcaactccctgctggagaaagcggaggatccgcagaagctggtccgtctgatgattcaggagatggaagacacgctggttgaagtgcgttctacctccgcccgcgcgctggcggaaaagaaacagctgacccgccgtatcgaacaggcgcaggcgcagcaggtggaatggcaagaaaaggccgagctggccctgcgtaaagagaaagaagatctggcgcgtgcggcgctgatcgaaaaacagaagctgaccgaccttatcggcagcctggaacacgaagcgcaactggtggatgaaaccctggcgcgaatgaaaaaagagattggcgagctggagaataagctcagcgaaacccgcgctcgtcagcaggcgctgatgctgcgccatcaggcggccagctcttcgcgtgatgttcgccgccagctggatagcggtaaaatggatgaagcgatggcgcgttttgagtctttcgaacgccgtattgaccaaatggaagccgaggcggagagccatcgttttggcaaacaacaatcgctggatcagcagtttgccgaactgaaagcggatgatgaaatcagcgagcaactggcagcgctgaaagccaaaatgaatcagaataaccagtaatgcatattgcgcggcgcggtgttgcgccgcggctcaccacctgtaaggagtacacatgagcatgctttttcttgccatcccgctcacgctgtttgtgctgttcgtgttgccggtctggttatggctgcactacaacaatcgctcggcggacggggcgttaacccagaacgaacagcagcgcctgctgcagctgaccgatgacgcgaaacggatgcgcgaacgcattcaggcgctggaagcgatccttgacgcggaacatccgaactggagagacaaataatggccggattggactttaataaaaaactgtggcgtatcccgcagcgcggaatggtgaagggggtctgcgccggtatcgcgcagcacctggatgtgccggtgaagctggtgcgtctgataaccgtactggcgatgatttttggcctgttctttttcgtgctggtggcctacatcattctgactttcgcgctggatccgataccggatagcgaactgtacggcgaaaaagggccgagcaatggcgatttactggccgccgtggatgccgaactggcttccggcgaacagcgcctgcgtgatatggagcgttatatcacctccgataccttcacgctgcgcagccgttttcgtcagctgtaaaatttttccatgtaactaacgaggcaacgcatgaatatgaaatggcaacaggcagggcaaaaagtgaaaccgggtcttaagatcgccggtaagctggtgctactgaccgcgctgcgatacggcccggcgggcgttgccggttgggcggtgaaatcggtggcgcgtcggccgctgaaaatgttgctggcggtcgcgcttgagccgctgctcagtcggctggccaatcgttttgcccgcggtatgaaataattcctcaggggaggaataccggcgcgctttatattggccctgattatccccatttaaatagcttatcattaaacgacattccttctgggcataacggactggcgatgaagcgactcaaaactgaattcaatgcgctggtcaaccgcggggttgaccggcatttacgtcttgccgtgaccggactcagccgcagcggcaaaacggcttttatcaccgcgatggttaatcaactgctgaatatccacgccggagcgcgactgccgctgctgagcgcggcgcgcgaagaacgtctgttgggtgtgaagcgggttccgcagcgtgatttcggcattccgcgttttacctatgatgaaggcctggcgcagctttatggccagccgccggcctggccgacgccgacccgtggggtgagcgaaattcgcctcgcgctgcgctatcgctctaacgattctctgctacgtcatttcaaagacacttctactctgtatctggaaatcgtggattatccgggagaatggttgctcgacctgccgatgctggcgcaggattatttaagctggtcacggcaaatgaccgggctgttgcaggggcagcgcggggagtggtctgcccgctggcggcagctgtgcgatgggctcgatccactggcgcccgccgacgaaacccggctggcggagatcgccgccgcctggaccgattatctgcatgcctgcaagcgcgaggggttgcactttattcagccggggcgttttgtgctacctggcgacatggcgggagccccggcgctgcagttcttcccctggccggatgtcgatgcggttggcgaagccaggctggcgcaggcggacaaacacaccaatgccggaatgctgcgcgagcgcttcaaatactactgcgagaaagtggtgaaaggcttttataaagaccactttctgcgctttgaccgccagattgtgttggtggactgtctgcagccgttaaacagcgggccgcaggcgtttaatgatatgcgtctggcgctgacccagttgatgcaaagcttccattacggccagcgaacgctgtttcgccgcctgttttcaccggttattgacaagctactgtttgccgccactaaagccgatcacgtgaccgtcgatcagcacggcaacatggtgtcgctacttcagcaactgattcaggacgcctggcagaatgccgcctttgaaggcatcagcatggattgtctggggctggcatccattcaggctacccagggcgggcttatcgaggttaatggtgagaagatcccagcgctgcgcggcgatcgtctgagcgatgggcaaccgcttaccattttcccgggggaggtgccggcgcggctgccgggccaggccttctgggaacagcagggcttccagtttgagaacttccgcccgagagcgatggatgtcgataaaccgctaccgcatatacgccttgacgcggcgctggaatttttgattggagataaattgcgatgagcgagccgataaaaccgcggatcgatttcgatggcccactggaaacggaaaagagccagactttaaaatcggcccgcgcctttgacgcggcggatgcgcaaaccttctctccgatgctgcctgaaatggttgctgaagaggaaggggccgccgaagcggtggtggaatcggtactgcgcccgaaacgcagcctgtggcggcggatggttagtgccgggctggcaatttttggtattagcgtggtggcgcagggcgtgcagtggacggtgacggcctggcagactcaggactggattgcgctcggcggctgcgcggccggggcgctgattgtcggcgcgggcgtggggtcggtagcgactgaatggcgtcgcctgtggcgtctgcgccagcgcgcgcacgaacgcgatgaagcgcgggatctgatgcatagccacgcggtgggcaaagggcgcgcgttctgtgagaaactggcgcagcaggccgggctggatcaatcgcatccggcgctgcagcgctggtatgcggcgatccatgaaacgcaaaacgatcgcgaagtggtgagcctgtacgcgcaactggtgcagccggtgctggacgcgcaggcgcggcgggaaatcagccgctcggcggcggaatcgacgctgatgatcgccgtcagcccgctggcgctggtcgatatggcgtttatcgcctggcgtaacctgcggctgattaatcgtatcgccaccctctacggtattgaactcggctattatagccgcctgcgtttattccgcctggtgttgctgaatatcgcctttgccggcgccagcgagctggtgcgcgaagtcggaatggactggatgtcgcaggatctggcggcccgcttgtcggcgcgcgccgcacagggtatcggcgccggattgttgaccgcccgcctggggattaagacgatggagctgtgtcgtccgctaccgtggatcgccgatgataaaccgcggctcggcgatttccgccgcgaactgatcggtcagttaaaagagacgctgcagaaaagcaaaaccggcgcggagaaatagcgtcggcaagcgtaaatgccgggtggcggctgcgccttacccggcctacggttcgtgcgacctgcctttaatgtcttcaccacgctggatcccccggtggcgctgccgcttaccggggctacagcgctttgcgatttggtagcccggagaaggcgcaacgcgccgcctccgggaaaacccctggcgcccagcgccctctgtgccatgcgagccataacgcaaaagaaatgcccgcataactttacggcataaagcccatttttccgccatactgtcaataattgttgacagctatcttcccgtaagcccatatctgtcctatcattcatccgtcattggcctttttagggtgaaaactcctatgcgtctggaagtcttttgtcaggaccgtcttggtctgacccgtgaattactcgatttgctggtgctgcgcggtattgacctgcgcggtatcgatatcgacccgattggccgaatctaccttaatttcgccgagctggagttcgccagtttcagcagtttaatggcggaaatccgccgtatctccggcgtaaccgatgttcgtaccgtggcgtggatgccgtcagagcgggagcatctggcgctgagcgcgctgctggtggcgatgccggaaccggtactgtcgctggatgccaaaggcaaagtagagcttgccaacccggccagctgccagctgtttggtcaaactcaggcacgcttacgcagccatccggtggcgcaactcattactgatttcaacctgcagcgctggctggaaggcaacccgctggagtcgcataccgagcatgtggtcgttaatggccaaaactttatgctggaagtgacaccggtgtatctggaaggcgaacacgccgagcgtgtgctgaccggcgccgtggtgatgttgcgctccaccgtacgtatggggcgtcaactgcaaacgctgacgacccaggataccagcgcctttagccagatcctcgccgttgggccgaaaatgcgccacgttgttgaacaggcccgcaagctggcgatgctcagcgccccgttgctgattgtcggcgatacgggtaccggtaaagatctgctggcccatgcctgccatctggccagcccgcgcgctagcaaaccttatctggcgctgaactgcggttcgattccggaaaatgcggtagagagcgagctattcggcgatgcgtcgcaggggaaaaaaggtttctttgagcaggccaacggcggctctgtgctgctggatgagatcggcgaaatgtcgcctggcatgcaaacgaagctgttgcgctttctcaacgatggtactttccgtcgcgtcggtgaagatcacgaagtgcatgttgatgtccgggttatctgcgcgacgcaaaaaaatctcgtcgagctggtgcagaaaggactctttcgcgaagatctttattatcgtctgaatgtgctgacgctgaacctgccgccgctgcgcgattgtccgcaggacatcatgccgttgaccgaactgttcgtcgcgcgctttgccgatgagcagggtatcccgcggccaaaactctctgccgaccttaataccgtgttgacccgctatagctggccgggcaacgtgcgtcagttgaaaaacgcagtgtaccgagcgttaacccagctcgagggcttcgaactgcgcccgcaggatattctgctgccagatcacgatgtgtcgtcgctgccggtaggtgaagaggcgatggaaggatcgctcgacgatattacccgccgctttgagcgttcggtattgacccagttgtatcgcagcttccccagcacgcgtaaattagccaaacgtctcggcgtttcgcataccgcgattgctaacaagctgcgcgagtatggtctgagccagaagaaaggcgaagaataaatcaccggtgcggccggctcggcgcggccgcgattttcagcgttttttcagcgatatctctgtatatacttattttattttattttatttttctttttccgggaaggtgacggttggcgaagcaacgggattggcctcagtggatgatattactggcactctccgccgtgctctcctttgtgctgttccggctccatcttcccgctgcgccgctgcgccgctgcttggcccgcttatcgccggaattacccttagtctgcgcggcgccacgattcgtctccctcgtccattcttcatctccgctcaggctatcatcggctgtatgatcgcccgcgcgctaaccccgtctattttcggcgttctggccgccaactgggcgctggtgttgattatcctcctttccacgctggctatcagcgcgctgaccggctggctgctggtgcgttacagttcgctacccggggcaaccggcgcgtggggaagctcgccgggcggcgcttcggcgatggtggtgatggcccaagagtatggcgccgacgttcgtctggtggccctgatgcagtatctgcgggtactgttcgtggttggcgcggcggtaatggtggtgcgtttcgcgctcggcggcgaggcgcaggagatgacccagcagatcgtctggttcccgccgctgacttttaatctaccgttaacgttgctattgactgcggtcgccggttggttagggttacgtttacgcatcccttccggggcaatgttgttaccgatgctggccggtgcgctggcgcagggtgaaggcatgctattgctggagctaccggaatggttactggtgctggcgtataccgcgcttggctggacggttggcctgcagtttaatcgcgagatttttatgctggcgctgaagacgctaccgcaaatcatcgccgccatcgtcggcctgatcgcgctgtgcgcgctgatggcttttgcgttaacgcacctgctgccgctggattttctcaccgcctatctggcgaccagccccggcggtctggatacggtggcgataatcgccgtcggtacccgggcggatatgtcttttatcatggcgatgcaaacgctgcgcctgtttaccatattgctcaccggcccggccaccgcgcggttaatttcgcgctatgcgccgcgcaaagaaaaaagcccccgttgaaggaggcttgataacagaagggaagcgattacgctttcagcgcagccagcgccgcatcgtaatccggctcttcggtgatttcgttaaccagctggctgtataccacctggtcgttttcatcgataacaacgactgcgcgtgcagccagaccagccagcgggcctgcggagatagcaacgccataatctgccaggaactgcggcgcgcgcagggtggacagggtgaccacattgctcaggccctctgcgccgcagaaacgggactgtgcgaacggcaggtcagcggagatgcacagcaccacggtgttgttcagctcagaagccagttggttgaatttgcgaaccgatgccgcgcagacgccggtatcgatgcttgggaaaatattcagtactttacgtttaccagcgtattggctcagcgtgacgtcagagagatctttggcgaccagcgtaaacggctgcgccttcgcgccagcctgcggaatggagccctgaacggacactgggttaccctggaaatgtacggtttgcgacatggttatcttcctgtttacatatagttaacgtcgtagttagtgtatgacatcagccagcaacacggcaaactctatttaacatttacctaagaggcccagggaatgcgcaaccttcgagtttttgaagaatcatggccgcttcacacgccgtttgttatctctcgcggcagccgcagcgagaccaaagtcgtggtggtggaaatagaagaggatggggtaaaaggggccggagaatgtacgccttatccgcgatacggggaaagcatcgcctcggtgatggcgcagattatggcgatcggcgagcagcttgagcgcggcgctacccgcgagcaagtgcaacagctactgccggctggggcagcgcgcaacgccgtcgactgcgcgttgtgggatctggaggcgcgccgcgcggggaaaacgttgccgcagctgcttggcgtcaatctgccgcgcgaagtcgtgacggcgcaaaccgtggtaatcggcacgccggaacagatggcggccagcgccgccgcgctgtgggagaaaggcgcgcggctgctgaaggtcaagctcgacgatcatttgattagcgagcggctggttgctattcgcgacgcggtgccgcaggcgacgttgatcgttgatgctaacgaagcgtggcgtggcgaaggtctggcggcgcgctgtcagcttttggccgatctcggcgtggcgatgctggagcagccgttaccggccggcgcggatgaggcgttggaaaacttcattcatccgctgccgatctgcgccgatgagagctgtcatacgcgggaaagcctaccggcgctgcagggtcgctacgaaatggtcaacattaagttggataaaaccggtggtctgaccgaggcattgctgttggcgcaggaggctgaacggctgggttataagaggatgctgggctgtatgctttgtacttcacgggccatttccgccgcgctgccgctggcgccgctggcccgttttgcggatctcgatggcccgacctggctggcggtagatgtggaaccggcgctgcagttcagcaccggcatgcttcatctgtgagtgtgccagtgtagtaaatcggtcatcgccgcgaggtacttttctgtcgcttcgtcggcggagaccggcggaaattcggcggtaatgcacggcaggccgatatcggcgcaccaactgccaaaagagcccggcgtttcgtaaccgacgctgcccaccagcggtaaattaaaagccccggcgagccattgtcccagctcgctgtggccggggtcctcaatgcaggccagcggatcgtggaaggagactacccacgccggatggatctggtggatcaactggcacagcgcctgggtttcgggctccgaaccgggtttttcaccggtcagcagaaccacatcacgctcttcggctgcactattccagcgatacaccgtttctcccgccttccagttagcggccgggaaattacgattgagatcgataccgcgggcgttggcgcgtaaccctagctgacagccgtcagggttgaccgttaataccacgtgatggcgacgcaactccggttttagcgtgcgcaacgcgcaggagagggtgacgatcgacgagttttcgtcgccgtgcgtgccggcgataatcagaccgctgcggctatctgccagcggagcggggaaccacagcagcggcgcgccgagatgcgactggccgtaacgttgcgtgcctggcgggaaagcgccgcgcagggggcgagggcgtgaaacgggcatagggtatcctgtcatcaggttattgttagcagtgttgtagaaaagcgtcccggaatcaaacgctttccctctctggcgaaaaaactcgtcatgtcaattttctatcataagccgtttgcaatttcaggtggggaaacaaataattatcgctctgccagcactggtttgttcatttaaaaggggatctcatgaagtatcctgtcaaattgacatgcggcgcgctgtggttagccagcgtttcttctcttgcctgggcggcggacgtgcctccgggaaccgtattagctgaaaaacagcagctggtacgccatataaaagacgagcccgcttcattagatcccgctaaagccgtcggcctgccggaaattcaggttatccgcgatctgttcgaagggctggtgaaccaggacgcgaagggcaatatcatccctggcgtggcgacccgctggcagagcaacgataaccgcgtctggacctttaccctgcgtgataacgcgcgctggtccgacggcaccccggtgacggcgcaggatttcgtctatagctggcagcggctggtggatccgaaaaccacctcgcctttcgcctggtttgccgccttagcgggtatcagtaatgcgcaaaatattattgatggtaaagcggcgccggacaccctcggggtgacggcggtcgatgcccacacgctgcgcgtgcagctggataaaccgctgccgtggttcagcaacctgaccgccagctttgcgttctatccggtgcagaaagccaacgtcgaaagcggcgctaactggacgcgcccgggcagccttatcggcaacggcgcctatgtgctgaaagaccgggtggtgaatgagaagctggttgtcgtgccgaatacacaatactgggataacgccaaaacggtgattaagcaggtgactttcgtgccgattaaccaggaatcttcggcgaccaaacgttatctggcgggtgatattgatatcaccgaatccttcccgaaaaatatgtatcagaagctactgaaggatattcccggacaggtctacacgccgccgcagttaggtacctattattacgctttcaatacccagaaagggccaaccgccgatgagcgtgtgcgtctggcgttaagcatgaccatcgaccggcggattatggcggagaaaatcctcggcaccggtgagaaaccggcctggcggttcacccctgacgtcaccgcaggctttactccgcagccttcgcagtttgagagcatgagccaggccgagcttaatgcccaggctaaagcgctgctatcggcggcaggatatggcccggaccgtccgctgaagctgacgctgctgtacaacacgtcggaaaatcaccagaaaatcgccatcgccgtggcgtcgatgtggaagaaaaaccttggtgtggatgtgaagctacaaaaccaggagtggaagacctatatcgatagccgtaataccggtaatttcgacgttatccaggggattacaacgagccgtcgaccttcctgtcactgcttacatcgacgcatagcggcaatatttcgcgctttaacgatccggcatacgataagatcctcgcccaggcggcgcaggaaacctcggaaaaagcgcgtaacgatgattacaatgcggcagagaaaatcatcatggccaaagcgcctattgcgccgatatatcagtataccaacggccgcctgatcaagccgtggttaaaaggatacccgattaccaatccggaagacgtggcctacagccgcacgatgtatattgtgaagcattaatcagtagcggttgcctgatggcgtcaggcaaccatcgctaacctcagaactggcgcggcttacagcgccagtttctccttctgaccattacccgccacagcagaaagcataacttttctaacgcatagttatcctgccgtattcggtgggataacaaatcaataaatatgtcgccaacgctactgcttcctggtgctggcgcgaacttgtaacgctgagggtaattcaatgaatttatccgtcgaattacccgccagcagctcaagcagtgtttgtcctgcgagggttcccgtttcactccaggggaattcgacggcagtcagcgccggtgagcaaacggcggcaagagtccccccgctcaggcttgccagtgccagagagtcaggcactttttgccccgcgccatggcaggccataatgcaaccgcaggcgatttcatcggatgtgcaaatcagcgcatcaagctcaggccaggtgatacgaatatcgccgagcaggttcaggccggtcgtaatgcctgccggcagatgagaggtcaccacgcgatgcggggagtggttaacggagagcatcgcgctgttccaaccgcttagtacctggcgaaacataatgttattggaagccgtgcaaagcaggccgatatttttatatccggtctgtacaagcgatgtgaccaactttttgatggctgcggcatagtcaacgccaatgctgacccagctcgcatcgcgattgatggcgccaatctcaaccaccggcacgccggtgttacttatcatttgcgaacaactgctgatgttatcaatattgaattgaacaatcgcagccgggttgtaagcgagcatttgcgcaaaagctttttcttcactctgtccaccctgaccggactcgataaacatcatgctatagccctgggtcgtgagcacggtctgtagtgtttcggagacggcaagaaagcccggggaggaaaaagagggaaccacgcccatcaccagactggagtcagcagaggcaaggttgcgggcctgcagatttggcacatagcccagctcgcttactgcggcttcaatgcgtgtacgcagttcaggattcactttttcaggcatgcgtaacgcgcgtgacacggtcatcgtgctcacgccgaccagttttgccacttcagcaagcgtaattttaccggtgtttttcctgcgtttttctctcgcgctatcgtccgcttctaacgtctgcactggtgtcctcctttcgcctgactgggcagccattgtaaatgatgtttggcattttacgcattgcccaactgcaaagtaatgataagtatggataacaaagttagcggtaacaagaattataacattgttgccatgttagcgctaactttgagatgaagatcacggtaagccgcgaagagattccactatagtaggctcactttcaatgctatcggggaatttatgatcacgacctggttaccaacggaaaatatccagattgtggattcagtcagtgactggaaacaggcaattacgttatcggctcaacccttattggcgaaagaggcgattactgaagtttatattcaggccatttgtaacagccatgaaaaacttggtccttattatgttttagcgcctggtctggcgatgcctcatgctcgcccggagcaaggtgcaattaaaaatggtttatcgcttttgcatattaaaaaaggcgtttcttttggctcggaagagaatgaccctatttacgtcgtgattatgctgtgtgcgctttcgggagatgaacacatcaatatgattacagccctggcagacatttttagcgatgatgaacgactctcagcactgctgaaagcctcatcaatgacgaaaattcaagccgttatcaatggatagtgaggtagagatgaaaaaggttctgattgtttgcggtaacggtttaggtagtagctttatcgttgaaatgaacgtgaaaaaaatcattacagagttaaataaagaagcagaggtttcccataccgatctgacttcagcaaaaagcgaaactgccgatattattcttagcgccagggatatagctgaacatctgtccagccattctgcacaggtttttggtttatctaacctgctggataacaataaaatcaaagaaattctttccgagaatctctgattaattatttgcggccttacggagtcattctatgctgcagtttattattcatgatgtgttgggcacaccagcaatactggtcggtttgttttccctgatcggcttattattgcagaaaaaagcagtttccgacgttatttccggaaccctcaaaaccattatggggtttgtgatattaacatccggggcggcgattgtcgccacgacgttaacgacatttagccagctgtttgagcactccttccatattcagggtgttgtccccaatactgacgccatggcggcgctggcgcagaaaaactacggtactgcgacagccatgatcatggtgctggggatgttgtttaatattgttcttgcccgtattacgccgctgaaatacatcttcctgacaggccaccacacgctgtatatgtcggcgatgctggctgtcattctctctgtcggcggtctgtcgccgttctgggtggtactggtgggggcggtaatcctcggcatcatgatggtggtctctccggctattctgcagccatttacccgcaaaattaccggcactgatgacctggcgctgggccactttggttcaacagggtatctgctgtcggcgctggtgggaaaagcgatcggtaaaggcagcccgtcgattgaagagctgaaggtgccgaaaacgctgaacttcctgcgtgactcctcggtggctatctcgctgacgatgatgattctgttcctgattctggtactggtcgcaggtaaagagtttgttgagaccagcatcagtggtggtcagaactttatcatctttgccattatccagtcgctgaccttcgcggcaggcgtgtggatcatccttgcgggtgttcgcatgattattgccgaaattgttccggcctttaaaggcatcgccgacaagctggtgaaagacgcgaaaccggcgctcgactgtccaaccgtctttccgttcgccccgaacgcggtgatcgtcggcttcctgtcaagttttgccgctggtctggtgagtatgttcctgtgtccgctgcttggcctgagcgtcattgttcccggcctggtgccgcacttcttctgcggcgcgacggcgggcgtttacggcaacatctgcggcggtcgtcgcggcgcggtggtgggggcattcgctcacggtctgttgatttcttttttgcccgcgattttgctgcccctgatgggcgaccttggctttgcatccaccacctttggcgatgcggactttggcgttgttggcatcattcttgggcatgtcgtgtcactgtttaactaactaattttatagaggtgaggtatggcagctaaattttcgccctcgttaatgtgtatggatttaacgcaattcagagagcaaattacggcaatgaacggtcgggctgatttttatcacgtcgatattatggacggtaactatgtgaagaatattacgctatcaccgttttttatcgaaaacctgaaaaaaattaccgatgtgccgatcgacgtacatctgatggtgaatcacccggaagatataattccaatgtgtattgatgccggggccgatattatcagcttccaccctgagacggcgaataacaaaatattccggctgttgaaccagattaaagacgcgggtcgtcgctgcggcgtagtgttgaacccagctactccggcggatgctattaaagagtacgcgcacctgctggataaagtgaccgtcatgtcggttgacccgggctacgcaggtcagaaatttatcccagaatcgctcaataaaattaaacagctgatcgcgatgcgcgaagtgcatggttaccactatctgaccgaaattgatggctcctgtaacgagaaaacttttaatgttatctcccaatcgggcgttgacgtctttattgtgggaacctcgggcctgttctccctggcggataatgtcagcgatgcatgggataaaatggtcgatatctatcaacgcgaaatcgctgcctgaaaattgcagcgcgctcagccgtattgagccattgcgcagtgcaaagtgtctatttaaccggtctgtctctttgccttcgcgttagatttatatggttgagagcgctgtaaccctttttatatctggagttcgcttgcgacgcctcgtcgtacgcttgcggatgctatctattatgctgtccggccccgacgggtttggcagactacgtggtggcagaagctggtatcgctgattacagatgattatttatgttaacgaaggtaacttatggacatttcgagtgtactgaacgtaaaaaatattaaattaaacatgatggctaagagtaaggaagaagcaattgaagaattagccgacttattagtacgtgatggagttgttattaataaagatatttttctgcaagatgtttggttacgcgaagaacagggctccactggattcgaaaatcatatagcgatccctcatggtaaatcctcaggcgtagcccgtacagcattggccattggacgaacccaacatcatatcccttgggaaactatggatggtagtgacgttcgttgtattattttatttgctgtatgcctggaggatcaaaataccacccacatccgattattatcccaggtttcaggttcacttgccgatgaagagatagtaggaaaattactgatggaagattccccgcagaaaatcattgatcttttaaatgctgaaggtgtcagcgcttaatttaattatcatagcatcgaaaacaattaaccctggagaatagttatgaatattgttggaattacagcctgcactgtaggtattgcacacacttatattgcgcaaaagaaaattgaaatagcagcaaaaaaggccggtcacaatgtcaaaatcgaaacgcaaggcactataggtatcgagaatgccttgaccgctgaagaaattgcacaagccgacattgttctgttagccgccgatgttaaagtttcaggtgaagaaaggtttgccggaaagaaagtcgtcaaagtaccaacggaaatggcagttaaatcaccaaataagcttattgaaaagcttggtgaattagtcaattcataacacctacctatgcgtatcctatataaaataaagggcgtaatttatgaatataaaagaaatatggaaagcagcaaaccctaaaggtcatctgctgactgccatctcattcttgattccgattgtctgtggtgctgggtttattattgccatcggtatgggttttggcgggacggttcaggacactttagtatcgggtcaatttgatctgtggcaggctttcgctaccatgggagctaaggcgctcggactattgcccgtcgttattgctatcggaatttccggttcgatcgcaggtaagcccggtattgcccctggttttgttgtcggtctggcagctaatgctattggtgcgggttttatcgggggcatgatcggtggctacatttccgggtatattgctcttgctatcattaaaaatgtgaaggttcctggctgggcccggggtttaatgccgacattgattgtgccattttttgcatccattttcagtgctctgctcatggtctatatcatcggcacgcctattggtatttttaccgatgcactcacatcgttcctgagaagtatgggaacttcatctaatttagtattaggtgctgttattggggcgttgtgtatcgttgactttggtgggccgatcaataaaacgtgctttgcattcgtcttaactctccaggcacagggtataaatgagccagttacggcccttcagttagtcaacacggcaacacctatcggttttgggcttgcattttttatcgccaaactgcttcgcaaaaatatctataataacgaagaaatcgaaatgttaaagtcggcggttcctatgggggtagtgaatattgttgaagggtctatccctatagtgatgaatgatatcgttcgcggtattgcagcagcggcaatcggcggtgcttgtggtggtgcaatcaccatggtgtatggtgcggatgcaactgtaccttttggcggggtattgatgctcccaacaatgtcaaatcccatggcaggtattatggcattgatagttaatatattagtaacagcaaccatttatgctgtcatcaaaaaagatgttcctcgcgatgttgttatcaataacgatcaagaagaggaagatatcaacttcgatgatattaagattagttagatatatgcataatggcatgccgtaacatgatgtcgcgttcacaatgaatgttattattatcgcgacatatattatttctgcattgtgttctaatcgccacgagtaacaaatgggtcgccatggtggcctatttgttacaggcatgttatcagaattacttaaaaagactatctaataatcaattacggccctgacgattaacgttgggtgaagagcatgagggtaaaaagcagcaatattttgtggttcactcttactcgtcgtttccatatccggcattaattcgatacgttcgccgctctgtagcgttgcgccaatcaacctgcctgtatttatgaattcaatgcataggtcaaatcagaaatgacagactaatcatggtggtgtttccggcctaaaatggtgttttaacatgacaggggccttgccgtgaaatattcagtattaagtaacaacctcagaatgccgatggtcggctttggcgtgtttaaggtcaccgataaagaagagtgtaagcagtcggtgttaagcgctattcgtaccggttatcgcctgattgataccgctgccatctacgccaatgaagatgccgtgggtgatgcggttcgcgaggctatcgccgaagggctgtgtacccgcgaggagttatttatcacgtcgaagctgtgggttcaggacatggccaacggcgctgtggctaaagccggtattgaggcgtcgctgaaaaaatcgggcctggagtattttgatctctatttattgcatcaggccatgggcgattatttcagcgcctggcgcgcgctggaagaggcttatgaagccggtaaactgaaagccatcggcgtgtccaacttctacgctcacgtgttagttaatttctgtgaaaccgtcagaattaagcccatggtgaaccaggtcgaattacatccttattttgcgcaacccgccgcgctggaaaccatgaagcgctataacgttcagcccgaagcctgggcgccgttaggcggtgggagacataaaccgtatgaagatgaaatgctgcaggggattgccgctgcccatcaaaaaaccattgcccaggttattttgcgctggaacgtgcagcgcggcgtcacggtaattcctaaatccacccggcaggaacgtattgcagaaaactttgatctctgggatttctccctaaccgataacgaaatggcgcaaattaacgcactggatttaggctatgtgggtgaagcggtgaaacattttaatccggaatttgttcgcggttgtctgggcgttaaaaagcagtaaaaaagtcataacgagacggtgggggaacccaccgtcctgatataaacattgccaatccacagatcttcgctttcttcttaccgggttaatctgcgccaggttgactataaaagacgttcatcaaactaatcagcacgtagctcgccagcctcccaactataaacatccgtgccaattaacgagtcgccaaactcttgataatcgaaatgataaaattcagcgctggcgccgtagcctgagtagtctactgccgcaagacctacaaatgcaccggtaaagaacccgccatagctttgcagaacatagtcatcggaaaggacggcggcatctaaaactaccggaatttcaataaaatcgacgccgtcaaaactatactcatagctataggtctgcttcctgactttcgtccgtaaccacacgtattcgacgtcgtcaggaatcttaatcgcgttatctttcaggtacgaagtatattttccacgattgttctcggcgacctcgatgactctgccgttaatttcattccaggtaacaaaagcaaagctccagtgacggtcgttgtagtaattggttaatccggccatttgttggtagctgaaaggattaaaggcgactttaacttcagcattaaaataaaaggcttgccagcggcgggcaatcaacgacagatcatgggtattcgctaatgaaccctggccgattaaggtgagctttccatggcctgtggtacccattttttcgctaaaaggcacccgcagggtattccagttaagattaagcgctggcgtagtaaattcatcgtgctggctattatctttcgcgctttcggtataaatggcgtctttcgggccctcgacaaacgttttaccgccgtgaccgccttcaatacgcggccagccatcttcatcccaatatactttttggatggccgtttcccggccaagggtagaccagccgcgaggatcatagattgattctccgggacgattccacggacgagcgcacagcgaagcataataccattcgccttcgggcgtcgaaaccaaagcgccgtgtccttgcttctggatatagctgtcaggggtatcaacgttagttaagaatacttctccaggctcggtttcaaagctgtcggcatttaaagtggtggaacgggccaccacctcctgatgagtaaataccgtccccccttgagcggcaaagagatagtaataaccgttcagtttatagagatgcggcccctcaacgagcgctactgcggtaccgcgatagatggtccgtgcggtttccggcattaattttaaagttgttgtatcaagctctgttaaggtaatcccatcaaaaggatggtggtactcccgatgatcccacgtctgttgcacaatatatttacggccatcatcgtcatggaaaagtgaagcatcgaaacccacgccattcagttttatcggcgcactccacgggccgcgaatatctgttgcggtggtcaggtagtttgtcatgtctttaaaggcaccttcggtgactttcacatcggtatacactaaccagaatttaccatccgcataagagagcgccggagcccaaataccgcctgaagacggattccccttcatatctaagagggtagtggttgacaatggcgacggcagaagattccagtgcttcagatcttttgattcatgtaaacgaacgccaggaaaccactcaaatgtcgagttggcgatatagtaggtgtcctcaacacggataatgctggggtcggcattaaaaccacgtaatatagggttttggataagggacatattattacacctttataaatttaaagtttactctgtattggatttacacccgaatctcatcaagctggcggttaatgtcgctgacgtgtttgtctgagatgggataaatttgcatgacgatcattgctacaatcgctaaggcgatggggatccagaccgctgtcatcatgatcccatcgatagcgctcgcgctttgctgcgcgccggtttcattaaatccatagacggccagcagccacagaggaatggcgccgccaatggtaaagccaatcttgaaaaacagtcccataatggcattaataattgctgcatttcgcttaccagactttaattcaccataagcaataacttcaggaaccagcgcccacataaatccggtggctgaggttaagccccactgtttaatgaatgtggcgatgtaagcaagccacagcgcatcgtgcatgccttcacgcgaccagacgtaagttaataattcaccagcaataaacattcccaggaaaatgtggaagaagccttttttaccaaaaatcttttttagttttggccaaaatatggggaacgcaatgccgggtatagaggcgaccagcccaacggcgcccatccattcggagtgaccaacaacatactgattgaaaaagccgttaaccgtgttcataaagaacatgaaggtaaaggccagcatgaaaaacaatccaagaatgacgagtggacgattatttttaagttcaaggaacagatcggttgttttaacgttggcggtctgttccgcggtcgcaacaacgcgttctttagtgaatttatagcaaatgaaaagtgccaccgcacctaataacatatacacggagtagacgccgaaccaggcgtaatttgctgatgggtcggtatagtttcccagattgagttctatgccaaaaaaaccggtatccttcaggttacggtcttttggtgaggccatttgcacgaacatcggaaaaagggtatacaccagaagattggcgctattagccagcatcattcgcgtactggttaatttatcaatagattccggatctcttgtcagtgaggcattaagagaaccataagggatattcaccagggagtagactaaatccagcgctaaataaatgataaaggcgaacggtacggaacctctcacgccaggaatgggagcaaaaagcaaagcggaaaggatcaccagcggcacgccggctcttaacagccagggacggtatttacccacgactgacgtccttttgtctacataggttccaaccatcggatcccaaaacacattgattattcgtacgaaaagaaaaatgaaccccgcagtggccgtactgatcgtattcaccgtcaacatatgtagagcaagaaagccgcctattgtgccgaaaaccaggttttgcgcaaaatcgcccatcccgtagccaatacgttccccacgagttaacttatgatattcatcattgcgactttgcattatttttttacccattctgagcagactccggtttgttgtgtgagtgtgaaacactttctgacacaaatgatctcgaagaatctattacgtttttaaattaattaattatgtttttttacttctgtgatcctcagagcaacagccacttgacacaatctatgtactctatatggattttctcgcattaaatatttgaaagtaatatttgcgaggtggctcacatttgagtgttttctcaatcgctgagtgaaataacgtaattgagtaaccggtttattgaatacaggatgtgtcatagttgttacatctcttacattcaccaatgtcggaggcattatgccatcttagtttaggcgaaatactatcaagggttttactcaccatataatgatgcccacgcggtagaacctctgtggcgatgatttttctatcagcgctaatcattaatttcgattgtggagaaagaattacgatactagtttaaaacctctgtaacggtacaaaataaaaataaattgttctcccaatagcgacatattctgcgtagccagagtaaggttgttattgtctgaataaaattaacctcaattgagataatgatgacaatgattagaaagcttccattaactatggcggttatcgccgcgttttctccgcttacctctgtaatagcccaagaatttacccaggagcagatcgacgccatcgtcgccaaagcggttgataaagcgctggccgaccgccaggctaaaattgatgccgcggccgataaaaaggtcgacgtgatgaccaacccgcaaaccaccgccgcttcgccggatctggcgatccctttcggcctgaaatttagcggttacgcccgctatggcgcccacttccagaccggcgaccagaaatatgtcggcgtcgacggctcctataacggcgcctcggcgattggccgtctcggtaacgaaagcaacggcggcgaattccagatcagcaaagcgttcaaaagcgcgcagggggccatctgggatcttaacgtcatgtttgaccactggagcgacgaggttaacctgaaaaaagcctacgtcggcgtcaccaacgtcctcgaatccaaccccaacgcctatatctgggccggccgcgatttccaccagcgcccgcaacaggggatcaacgactacttctggatgaaccacgacggccagggcgcgggggtgaagaacttcgatatcggcggcgtgcagttcgacgtggcgacggtgtcgcaggtgaaatcctgtagcccggaagtgatggccgatgagaccaacccgtcgcgcatcacctgtaccggcagctccgataccggcgataacggccactacgcgctgaccaccaaaacccacaacatcaaagccgggccgatcgacgtcgaggtgtacgccaactacggctttgactcaaaagcggtggacagcgacgcgcgcctcgatgcctggcagggcgggctggtgctgagccacaccaacgacagcggggtgaacaaggttatcctgcgctactccgacaactcggataacagcgtctacaacaaaaccgacgacctgaccacggtctacgccagcttcgagggcagccataaattcacccagcaggcgcagatcgagtatctgctggccttccacgactacgacaacggcaaggataataccgataaccgtaaaaactacggcgcgatcgtccggccaatgtacttctggaacgacgtgcactcgacctggctggaagcgggctaccagcgcgttgactacgaccagggcggggataaccacggctggaagctgacgctgtcgcagaacatcgccatcggcatgggtccggagttccgcccgatgctgcgcttctatgtgaccggcggccaggtgaataacgaacacaccgcgaaagtagacagcaccagcgacgagcggttggattcgctgaacatcggcggtatgtttgaggcctggttctgagagaatgtgtttacgggaataccagactggcctatgccagtctggtagtttttggcgcccagaacgctattttattaacttctatattaatagttccttttaataattcctttattaaaaggaatgagtttatgtcgattctgaaagttgaatttataatatttaaatagtttccatctgtgattgagtaaattacatattggttgtcgtgttgagattgcatgagttattggttgaaattattgcttgccagcgatattgatctatgccaattaaatgactcgttatctctggatcttcgtatctgctggttgatatattaccctggtttctttaaacataacgttgtgaataaaacgaaatttactccacaatcattccttaaggaaaagggaccgctatggctgattcattccagaatgaggtgccgaaggcacgtattaatttaaaattatccttacataccgggggggcgcagaagaaggttgaactaccgcttaaattgctcaccgttggtgatttcagtaatggaaaagagcatcgaccattggccgagcgccagaaaatagatatcaataagaataattttaatagtgtgctttctgaatttaacccagagatcaatctcaccgttgagaatacgctggccggtgataactcagaagacaatgttaaactgcgtttttccgatataaaagactttgagcccgaacaggttgcccggcaaatccctcaactccgcgccatgctggcgatgcgtaatttattacgcgatctcaaatcgaacctgctagataacgctactttcagaaaagagcttgagagaatccttaaagatccagctctgtccagcgaattacgcgccgaaatgagtgcccttgccgggaagtaaacggcggtcatctcttttaatggattaaccgggaatatgctgatgtctgtaaatactgaaacgaaccccgcgcaggggcaaaccgccgtaatgaacaaagaaagcgtttacgcttctctgtttgaaaaaatcaatctgagcccggcatcaagccttggcaatattaatgtctttctggacgatgcggcgctatcagaggccactgcgggagaacgcctgaccgcggcgatgcaggtttttatggactgcattcgtcaatccggtcagcaggtggagaaactcgataaaacgcttattgaccaccacatcgcggagctggatttccgtatcagccgtcaactcgatgctgttatgcatcacccggagttccagaaggtggagtctctgtggcgcggcctgaagcaactggtagataacaccgactatcgccagaacgtgaaaaccgaaatcctcgatgtgtccaaagacgatttacgtcaggattttgaagatgcgccagagctgatacagagcggcctgtactggcatacttacaccgccgaatacgacactcccggcggcgagccgataggctcggtaatttcagcgtacgagtttgacgccagcccgcaggacatggcgctgttgcgtaatatttcgaaagtctccgctgcggcgcatatgccatttatcggcgccgttgggccgaaattttttctcaaggattcaatggaggaagtcgcggcgattaaagatatcggcaactatttcgatcgcgctgagtacattaaatggaaatcgttccgcgataccgatgactcgcgctatatcggcctggtcatgccgcgggtattgggccgtctgccgtatgggccggacacggttccggtgcgcagctttaactacattgagcaggtaaaggggccggatcatgaaaagtatctgtggaccagcgcgtcattcgccttcgcctcgaacatggtacgcagctttattcaaaacggctggtgcgtgcaaatccgcggcccgcaggcgggcggcgcggtgaaagatcttcccatccacctctatgatctcggcactggaaatcaggtgaaaatcccttccgaggtgatgatcccggaaacccgtgagttcgaattcgccaatctgggctttattccgctgtcttattataaaaaccgtgactacgcctgcttcttctcggctaactcaacccagaaacccgcgctgtacgacaccgcggatgcgacagccaatagccgtatcaacgcccgcctgccgtacatcttcctgctgtcgcgcatcgcccactacctgaaactgatccaacgcgagaacatcggcaccaccaaagatcgtcgcctgcttgagctggagctcaatacctgggttcgtggcctggttacggaaatgaccgatccgggtgacgagctgcaggcctcacatccgctgcgtgatgcgaaagtggtagtggaagatatcgaggataatccaggcttcttccgcgtcaagctgtacgcggtgccgcacttccaggtggaaggcatggacgtcaatttgtctctggttagccagatgccgaaggcgaaagggtaacacgcctgtcactatccaggtcgtctggctcgacaggctacagcctgtctggcgacagacaacacacccgcgccatctcaggatgatggcgtgtcaaaaaatgaaatggagtaattaacatggcaataccagtctatttgtggttgaaagacgacggcggggcggacattaaaggttccgtggatgtgaaagatcgggaaggcagcatcgaagtggtggcgcaggagcataacctgtacatcccgaccgacaacaacaccggaaagctaaccggcacgcgtatccacacgccgtttctgtttaccaaggaaatcgactcctcaagcccctatctctacaaggcggtgactaccggccagacgctgaagtctgccgaattcaagtggtacaaaatcaatgatgctggtcaggaagtggaatacttcaacacaaaactggaaaacgtgaaagtggtgaaggtcaatccgctgatgcacgacatcaagaacccagcctacgagaagcacagccatcttgagcagattgaactgcgctacgaaaaaatcacctggacctataaagacggcaacatcattcattccgattcatggaatgaacgaacgacagcctgacgcccgaagcaggcggttcgccgtctgcttttttgctaagcgcctgtgaccgctggcttttagcaaaaaacaatcagcctgcccgatcttgcgcgctttggtctcctgcatcacgggaaacggcgatgggcggtagcgtgtccggaatcgacaaagagagagcctcatggaaaacccagccatcctgttacgccgtttaaacccttactgcgcccgcgccctggaaggcgccgcttcgctgtgtcaggcccgcgcgcatgcgcaaatccttcccgaacactggctgctaaagctactggagcagggcgagggagacctgaccgttttagcgcggcgttatgagtgggatatggacgctatctggcaggatctgctctcttttctggaaacgcttccgcgttcggtacacagccggccgcagctgtccggcagcatccagagcctgatgcaggaggcgtggctgcgggcttcactggcgggggagacctctctacgcagtgttcatctactgatggcgttagtcagcaacccaacgcgggtgcgctgtgacagtctgtggccgctgttaacgttgggacaagcgcagcttgaacacctgcgaccattattagatatgcagtctgatgagcgcccggaattacagccagatgagcctggccacgctggcgatgtggattttgtcggtcgccccgtggaatcggccgtgaagtccgctgagatgaaccctgcattacagaacgcgctggataaatttacagcaagcgctacgtacgctaacgctgacctatgccgatcttagtttgatttatgaggtggaagcgcatctgaaagcgctggatgctgcgctacagcgtctggaattaaagcatgccagtcagtttgatgcgttgctcaatttaatgcataacgcggcggtacggctggagaatagcgatggtgtaactagcgttgataccctaccgcacgtagtcgcgatggagaatgcttccacccatttggatgagcgggttgagcgaacgaagtgggtttatattgcgccgccggaaacgctaccacacgagcaagccggcaatgagcgtcagaattctgaaaaacgatggcgaccttttgtggccggtatgctgacgatgctggcgctggccgctgcggcgggatgggggtggcaggcgatggctaaaccagagccggaacagcggcaattcgctctcagtctggcgccattgccgacggtactttcgccagatcagttacgctccttttctcagcacgcaccgccggcagacggtgggataaagcagacccggcagcagctgtcagatctggcccaactcaagccgaattgggccatcgactatagcgagcaactggtacaacaggcacaagtgctatggccggagcaggcgaaaacattgtcctcgcagtggcggcagcagatcatagccgccgcgctgccggcggaaaatctcaccgggtggtatcagggaatgcagcaactgcagcaattaactcagcgtctggatgcccttgatgaacagaagggcaaatacatgacggttagtgaactgaaatccgcggtgttcgccattactcagtcttttaatcgaaccgtcccggctgaagaacagttacgccaactgtcagcgatgacagaaggacaaatcagccgcgccgcgcagcaacaacaggcggaacaacacctgcagcagctgatagtctcttatgcgctactgaaaagtaaaatggcggaatagcttcgcgcaaggcgtaagggctggggcatatcgtagcgtagcgactccagccccggaaaaggcgtttaccgctgcagcacctcggcaaatttagcaagccattgcggatgggcgggccaggcgggggcggtgaccagattgccgtcaacgtgcgcctggtcgatgccaatatccgcataatgcccgccgctgagtcgcacttcgggagcgcaagccgggtaagcgctacaggtacggcctttaagaatacccgcggcggccagaagctgcgggccatggcaaacggcagcaatcggtttatgcgcggcgtcgaaagcctggaccagtttaatcacctgctcattcaggcgcagatattctggcgcgcggccgccggggatcagcagggcgtcgtagtcctgttctctggcgctggcaaaatcggcgttcagtacgaagcggtgaccgggtttttcgctgtaggtctgagcaccgtcaaaatcatgaatcgccgtcataatatagtcgcctttgctcttatccggacagacggcatcaacctgatggccgatcatctgtaatgcctgaaacggtaccatggtctcgtaatcttcagcgtaatcacccaccagcattaaaattttcttgcccatattcttgttcctcccacgataaagatgaataagatatagactgccacaagagagaaagcgaaccgtgagggcgctcaaaaatggttattgatgacatttggctgccgggatttaacccgaggggaatgcgttgccgcagctaacggccacggcaacaaaaagcggtcagagttaatccacgttagtgaagtagtcgcgagcaaccgcttctacacgcttcgcttccaggccggtcttttcgctgatcccggcgataaacggcttgaactgctcggtcatcacgtggccgccgtcccagtgggcgacgtagtaacggcactgatagcgataaaagtggagggtcttttctcctaacgtgtaatacatgacattctcctgtccagtgtgtcgggctgcgtccgcagaagctaagggcgtaccacaataatcaggtatttgattatatcctgctcccaaatgtggcaaatttccagcagccaattggcgatcgagagagattttccttgggagggttttcagcagaagagaatatgtagcggctgaagaatacgacagccgccagggagagcttactgaagcccggccagttcgttggcggttaacgccagcttctgcacgctgccgctttctgacgaggcaacggcagcttccagcaccgccatcactgccagcgcctgtagcggaggcaccgggttggcgattttgcccagcagggcatcgcgaacctgaatatagtactggcgctgatcgcctttcggcgtggcgagcgtgtgcgcctgcaggctggcgtcgaacaacgtcatgctgtcgtcatcctggccccagctttcactccctgggatgacgcctgccagcagctggctctcctgctggtctgctttcagtttcacgacgctgccgctatctccgtggaccgtgaaacgcgagacgccgccggccaccagcatgctacagtgcaaaatcactttgtgctgtggatagttcagtaccacatgtgcccagtcgttaatctctgcgccctggcgcagggtggcaatattaccctgtacagtttgcggcaggccgaaaagttgcagcgtctggtcgatcaggtgcgggccaatatcaaaccacaggccactacccggtacgttctgttcgcgccagcggacgcgaacctgcgggcggaagcggtcgatatgcgactcgaaatgcttaaccttgccgatcagcccctgctcgatggcctgcttaatgccgagataatcgctatcccaacggcggttatggaagacagaaagcaaccgttgcttttcttccgccagcgcgatcagctcgcgcgcttcctgcatatcgagagtaaaaggtttatctaccactacgtgcttaccggcattgagcgccaggcgagccagcggggcgtgggtggcgtttggcgaagcgagtaccaccagatcgacgtccggatgctgaatggcctcttccggcgaagcgatgaccgcgacatccggcagatcctgcttcactttagcttcgtcgcgggaggcgacgatggcaagctttaacccttcgaccgaattaatgagcggcgcgtgaaacgttttgccgacaaatccgtagccgatcagcgcaatattaatgtgcttacctgcgccgttgataactttatgcatgactttctccacgttattcagcgtcagcaatgctgacctgcattgaattgtcttcgccaagcgcgtgccacggcttgtcgaggaatagacgatcgatgtgtttcagttcggcgaccaggtaaggctcgcagcgattaagtttcagatgatcagccaccagccagtgctcgacgctggcagccagcatggcgcgtttcacttcagcatccgcttcctggctggcgctaagcccttgccgcgcatggatcgcgcaggcgccgagaatggcgatatccgcgcggtaacgagaaagcagcgccagcgtggcgctaccggcaaacagccgctgccgcatatcccatttcccgccaagtaaaaccaactcgatatcgggccgttcgctaaatagttgggcaatatccagcgaaggggtgatgaccgtcagcggtccttttagatgcgcggcgacggcgagtaccgtgctgccggcgtctaaaaatagcgttgcacccggtgggacttcacgcgcgaccagcgcgccaaggcgttgcttagtctcgggcagcagcgcattgcgcccctggcgattcatggccggaagatcgagggcgatagcgccgccatggtttttctgcaccagtccgcgtttttccaggtcacttagatcgcggcgaacggtatcgggcgagacctgcaatcgttcaaccagttcgctgatgctaatttgaccgttttcgctcagtagttcgagcaaaaactgttgtcgggcggttttatgcataattgctgttcctgcaaaatactgcaacaacctgcataatacagcatgatgtgagaatgtgaatcgcaaaaaacagcaaaaaatgcgttgccagttaaaaggggagatggagcatcgctttttgggaagggggaccggctcagcgcagcctgtagagcgttaaaccggtctattcaaggtaatccgctcagcgcattacccagtgctgattaccgacttgttcgtagcgacgggtcggcggctgccagtctttatcgcgaaacggcgacggcagttcatcgttattggcttcacgcaacagatggcgacgagacggatcggtctttgggatcgccgcaatcagcttttgcgtatacgggtgctgcggattggcgaaaatggcctgccgcgggccaatttcgacgatttcaccgagatacatcaccgccacccggtggctgatccgttcaatcaccgccatatcatgcgagatgaacagaaaggcgattttcatcgttcgttgcagttcgataatcaggttgaccacctgcgccttgaccgacacatccagcgccgacaccgactcgtcggcgataatcaccttgggattcatcgccagcgcgcgggcaatgcagatgcgctggcgctgaccaccggaaaattcatgcggatagcggttaagtaccgcgacgttgagccccactttctcaattaattcatgggcgcgcgccagcgcctgctggcgggtggcaaggccattttccagcagcggttcaatcagcgtttcctggattttcagccgcggattcagactggcgaacggatcctgaaatatcatctggatatcctgacgcatccgcttttgctgctggcgcccggcttgcaggacgtcataaccatggagacgaacatgaccggattgtgcctggaccaggcggataagactgcgaccggtggtcgatttaccgcagcctgattcgcccaccagcgatagcgtttcgccgggccataaatcaaagctgacgttttctacggcgtgtatatgcccggctaactgattaaaaaagccttttttgacgggaaaacgggtgaccaggtttttgaccgacagcacaggttcgttgctggtcagactgagatccgcttctggcggataacgatgaatttctccggtttgcaggttcaccgatggaaatttacagggggtcgagcttacatccatttcacctgccgcaggtaccgaggccagcagcgcgcgggtatagggctgttgaggtgcggcgaatagcgtcggcgtgcgctcgcattcgatggcgtcgccgcggaacatcaccagcgtatcgtcggcggtttccgcgaccacgcccatatcatgagtaataaacagcactgcggtattgttttctgcctgcagagttttaatcagatcgaggatttgcccctggatagtgacgtccagcgcggtagtaggttcatcggcgatcagcagtttaggcttcagggccagcgccatcgcgatcatcgcgcgctggcgcataccgccggaaaactgatgcggatattcatcgaaacgctgtgcggcatgcggaatgcggactttttccagcagggcgatggcctcctgcttcgcctggcgcgccgataacctctgatggcggataaaaacttccgctatctgattgccgatggtaaatgccggattaagactggtcatcggctcctgaaaaatcatcgctacctcggcgccgcgtacacgacgcatctcctcttcaggaagctcgagcagggattggccgccgagcaacacctgtccctcggtacggctatggcgggcagaaagcaggcgcatgatggccatcgccgtcacgcttttgcctgagcccgattcgccgacaatcgccagcgtcttacctggataaaggctaaaactgatattacgcaccactttctgccagctatcgccgtggcggaatgagatgctcagattgttgacggccagtactggcgcaggcgtttcccggttcatgactcaggactccctggcaaagggcgcgcgggcggaaacccgcacctgtggggtgaattcgaggtcacgcgtaaacggccaggtcggggtcagcattcgccggcgggccacccgttcaatatcctgatcgacgaccccttccgagagcgccatcaggttcggattggccagcggcgccagttccggcgataaatagccggattttaccaccagaattttcacctgccgcgggtctaaccccagcgcgctaaagtcagcaatgtcatgatacggacgacgacggtcagccaccaccacggtaataccgccggtctgcaaaatcgcctgattggccgggcgctgcgggcctgccgccagcaaacctgtcacggtaaaacgcgcgctcgcgctgacgcccgccggatcgaggttagcgccgagtgttagctgtagttcagcgccaataccggcttcaaaggccgcacgcgttgccggcgcgtcggtaatgccggcaaccagagtattttgcgcctgttggcgtagcagttcggcgagcacatcgccgcgatcgccgacgccgccgccggttggattatcgccagaatccgccaggatcaccgggcccgtggcgctggcgatagcctgagtgacgcattcggctacgctgcccgtcctgcagccgaaaacaaaatcttcccgcgcgtcccaatatgcctgagccagttttgcggcctgttgctccagtaccgcgcgatcggtgccggtaaaaatggccgcggcggtggcgcgcggttcatcggcccatacgtagccgaccattaatgagctatcgagtacgccgtctatctggtcgctgtgcggcagcatggcgtacaggctttttgccggttcatcatccgtactggttcgttcgccaggcagtaataccgggatgggcgcccacacgacgcccgggcgcacgccgctttgcagactattcaccagcatactgaccgaacggcgcatggtctcttcgatatcgatatgcggcgcggtgcgataggttgagtagatgtcgatggcgtcgatgatgcgctgggtcacgttaccgtgtagatcgtagctgacggcaatcgggcagtcatcgccaacgcaggcgcgggcggcggcgacccagtctccttcggcatcttccataccttcaacgaacattgcgccgtgcatcgccaggtacaggccgtcgatcggcagttgcgcctgtagacggcttaagaattcagctttgaactgttcataggtctctcgcgccaccgggccgccgggaatcgccctggtgtgcagcgtcggcagaaacgtcgccggataatcacgtaaaaactgaaagtggggcgcctccagcagggcatcgcccttgacggtgcgaaactccgcttcatgagtcagtactgggttaaacgtgctgcattcaatatgtattccgccaacggcaatgcgcatagggacctcgaaattaggctgggaaaagaacgtgagtcagcgcgacgctcgccgcggcgagcgcccaactgtcctgcgtcagcgggcgatagataagcggtgtgtttcccgccatccccggcagcaggttggtttctatagcttgttgcatcacggtattcagtaaaccgttaaagctttccggctgatgggcaatcatgatcgccgccggatcgtgggtctggatctgatgtgaaatagccaaccctaaggcgtcaccggcccgatgcaagatctggatggcggcagtgtggcccttgcgcgccatggcctccagttcatccagttggtcggtgttgataccggccatgcgcgcctgttcaaagatagcggtgagagatgcaatggtgtcgagacagccgcgcttcccgcagcgacaaggcgtgcctgcaggcacaatggtgcaatgggctatttcgcctgcgccgccgtgggcgccgcgccagattcggtcatagatgaccgccgcgctgccgatgccgctgccgtgggaaatcaccactgcgctctccagcttgcgcagatgaccaaacgttttctcccagttcgccagtgcccgggtgtcgttttcaataaataccgggatcccgccggtcgcgtggcttaacaattcagctagcggcacctgatgccagcccagcagcgccgactgtacgcagaccgctttcgcggcgtccacaaaggcagacagggcaaaaccgatgccgaccagccgttggcgctcgatgagcgtatcgtttaataaactgcggatttcacccgccagttgctggattacgtcggggatttcaagctgtggcgtgagcaggcgctcggcgattttctcgccgctggcattcatcagcaccaacacaagctgattatcaatcagtgagatgccgatggcgtaagcagcgtccggcgccagtgacagggtgacggaggggcgtccctgacctccggaagcggccatatcgctctcctgtagcagaccatcagccagcatctcttttaccagcgcaccaatggccgctttactcatacccgtcagacgggcgaggtcagcgcggctggcgccttcctcgctacagaccaaatgaatcaattgttggtggagtttgttcagcatagttactcagccataacgcttttttctgaacataatcgcgggctggcgctttagcaaccactttattttcaaaaataactaaaccatcacatataagttaaatttattacctaattaagcgttattcatggctaatatcacatttatgggactctgttttaggtaaaaagaaaacctaatcgcaacataaaagccacaactggcgacataacagacaggtaggggttaacggatgaaggcaattatgaataaatatcgacttgccattctggcaggcttactggcggctggtggggcgacggcgctgcaggcggcgacgctgaacgtgatgcaaaacgaacctccgcgtagcatggacccgggcgatcaaaccgcgacctttaccgatactgtattaaaaccaatgtacgaaggactggtagatttatcgccggatttcaagatagcgcccgcgctggccactgcctggaaggtgagcgatgacggtaaagtctggacgtttaccctgcgtaaaaacgtcactttccatgacggctcgccgttcaatgccgatgcggtggtcgccaatatcgaacgacatatcgacccgaaaggcggtctggccgcgagttcgcggatgcgcaacgttatcgcttccgtgaagaagctcgatgataacaacgtcgagattacgctgaaaaaggtctatccctctttcctcaatctgttgaccggcggctcggcgaagatggtgagcccggcggcggcgaaagccggcaccattggccgtaaagcggacggtaccggcccgtacatgctgcaggagtataaaaccggtgaatacgtgctggagaagaaaaacccgaaatactggggcgagaatcacggcccggatgagattaagtggacctggagcgcggagccgtcggtgatgaacatggcgctgctttccggccaggtcgatgtgattaacccggtaccgccacagtttggtcggcagttgaaaagcaacccgcaggtgaaactggagcaggggcagggagcgtcggtattctgggtagcgctcaatgttgagcaaaaaccgctgaacgatgtccgcgtgcgtcaggctctgaacctggcgactgacaaagaagcgctgctgaaggcggtgatgtttggctttgcttctgccgccaactcgccgctggcgccggtgaacgaaggatatgataaaaccctcaacgactatccgtgggatctcgataaagcgaaagcgctattaaaagaggccggttacccgcagggctttgagatgaacatcgccgtgcagggaccggatgcgcgtaccgcgcaaatcctgcaggcgatgtggggcaaagtcggcgtgaagctcaatatccagcagatggagagcggcgtctggagcaaagcggcgtttgccccggcggcggaaaagttggccaaccgtaccgatgcggtgctggcctcctggtcctccggccttaatgggtctgatttgcaactgcgcccgctgtactactcacagagcgccgcgccggccggggctaaccttggcttctaccgcaacccacaggtagatgagctgttagataaggccgctaccaccatggatgacaacgcgcgtatcgctgaatatgtggcggcgcaaaaggccattatgcacgacgcaccgcatgtgatgctctacttccaggacgatctgtacgccacccgcgccaccattaaaggcgtgcggatggagccgggcggcgaaattatcgttaccgaagcgcaaaagccataacgtcgaggtcagggtggagttgttatgaaagcttatgtgattaaaaaactgctttctttgccgctgatcctactgggggcatcgctgattgtctttctggcgatcagaatgctccccggtgacccggcccgcctgatggccgggccgcaggccacccaggatgatgtcagccgtatgcatacgcgcctcggtctggacgatccgctggcggtgcagtatggccatttcgttagcggaatgctgaagggggattttggcacttcgctgaagtccggtcagccggtctccgccgaaatgagcgaacgggttccttatactttaggcctggcgctgctggcgtggatgatggcggtgatcctcggtattcccatggggatgtgtgcggcgatttaccgcaatcatgttgccgaccatgtgctgatgctggtggcgattgccggcgcgtcgatagccaatttctggctggcgctgatcgccatggataccttttcggtgaagctgggctggctaccgctactgggcgccgaaggctggaaaagctatatcctgccgtcggtttgcctggggattttcccgatggcggtgatgtcgcggatgacccgctccagtatggttgatgtgttaggcgaggattacatccgcaccgcgagggccaaagggctggcgccgtttcaggtctatttcaagcatgcgctgcgcaatgcgctgatccccatcgtgacgattatcgcactgaacttcggcagcctgatcggcggcgcggtggtgaccgagtcggtgtttaactggccggggataggccgctatctggtggattcggtacgctatcgcgattatcccgtcattcagggagtgacgatgattacggtggcaagcgtggtggtgatgaacctggttggcgagatgattatcgccagaatcaacccgaaaataaggtttgactgatatgtcggaaatttcactcgccaaatcgcgcagcggtgtgctcagcggcctgcgctgggggatggagcatccctcgctgaccctcggcggcatcatcgtcgccttaatcgtggtatgtgccctcttcgcgccgtggttaagccactacgatccctatgcgcaggacctgctgaatattctctccgcaccgtcggccgaccactggctgggcaccgatgactatggccgcgatatcttttcccgcaccatttacggcgccaggatctcgctgattgaagtggtggtcagcgtggcgctgtcgctactgatggggctacctctgggcattatcgccgccctgtgcggtaaaagtgtcgaccacctgattatgtgggtgatggatgtcattttcgcttttcccggtatcgtgctggccatcctgctggtcagcgtcctcggcgcagggttgatgaatatgctgctggcgatcgctatcttctcggtgccggtttacgcgcgcctcagccgtaacctgacgttgggcatcaagaatatggagtacatggaagcggcacgggcactgggaattggctatcgccggcagataatccactacatcctgcgaaataccctggggccgattaccgtgcaggcgacattgaccggcggctcggtgatcctcgccgcggcttcgctctccttcctcggcatgggcgtgcaaccgccgatgccggagtgggggacaatgatgagcgatgggcgtaacttcctgggtatcagcctggggatttcgctatggccggggctggctattgtcttttcggtattaggcttcaacctgctgggcgatggcctgcgtgatttaatggattcgcgcctatgagtaacagcgtgctttgtctggatattggcggctcctttattaaaagcgcggtttctccggcgctggggcaacttgttatgccgcgccagcgggcgatgccgctaagctcctggcccgccttcgtttacgccgtggaggagattatcgcgcaatatggcgatgcgattagcgaacagagtccactggcgctctcctgcgccggcgtggtagatgttgccaacgatcgtattctgtcgagcaacattccgccgtttgccgatattgatattacccaatcgctgcagactgagctcgggcgccaggtggcgatggctaacgatgctgactgttttaccttagccgaggcgcgtttcggcgcggcaaaagatctgccggtggtgttgggcgtgatcctcggcagcgggatcggcggggggattgccatcaatggtaacatcctctacggcaatcaggggatcggcgccgagtgggggcacggacccattacgcgcactcatctgcggggaattgagttgccgcggctggcctgcggctgcggacagcagggatgcctcgatacgctcggcggtgcaaaagggatgcagcggctgcatcaactgctcagcggtcaggcgttaagcagtgtcgagatcgtgaagcagggtatggccggagaagagacagcggcgttgacccttgaagtatggcttgaactgatgagcgaaccgttggctcatgcggtaaatatcctcgggccgcataaaatcgtcgcaggcggcgggctggcgagcgaaacgacgctgctggcgcgccttgatacagcattgcgggcaaagattctgctgaagagcgctgagccactactggtcgccgggcaatttagtcgcgaagggggattactgggggcatcggtgctgggctgggaaaaattttagccagaaatgtggcgaatttgacggaagcttctaggattagagcctatcccagtaggcgtaattggcacagccagtttgaacacggacagcgcgcagaaaccggagcgtacacgtagtacgtgaggatttcgagcactgccctggttcaaaatggcaagtaaaatagccctaatgggataggctcttagtctgcttataaaaatggagtaataaccatgtgcactaatttacacgataacgcccgccgctatgcggaagagaaaaaatgaacgcttgctactaatcctgtcctgtgcccgcccagacgacggcaaaggttaatacagtggattagccgacgactgatacgaacgaataagaacccgccaatggcgggttctccctttctggcggcctgaacaacttttgtgctgtagtgccattagcgtcattaaaaacggtgcgctgtctacttgttaggcgattgcgacgattgcgggaggcgaaatgcagccgaatagcgtaccttatggattattcacgctttttacagacatgcattaatggaggttcagtggacgcgattaagggctcggagctgaaagtgccggacgccatctttgcatgggtgctcgacgggcagggcggcgtaaagccgctggctgatgacgatattatcgataagagcagtccctgctggctacatctcaattatacccataccgacagcgccgactggttagccgccacgccgttgttaccgaataatgttcgcgacgcgctggccggtgaaagcacgcgcccgcgggtgacgcgtatcggcgatggcgcgctgattaccttgcgttgtatcaacggcagcaccgatgaacgccccgatcaactggtggcgatgcgactgtatatggacgagcggctaatcgtttccacccgtcagcgtaaggtgctggcgctggatgatgtgctgggggatctgcaggaaggcaacgggccgacggattgcggcagctggctggtggaaatttgtgatgcgttgaccgatcacgccagcgagtttattgaacagctgcacgaccggattatcgaccttgaagatgacctccttgatcagcaggtgccgccgcgcggttttctggcgctactgcgaaagcagcttatcgtcatgcgccgctatatggctccgcagcgcgatgtctacgcccgtcttgccagtgagcgtctgccgtggatgagtgacgatcaccgtcggcggatgcaagatattgccgaccgtcttggccgcggtcttgacgagattgacagctgcattgcccgcacagcaatcatgagcgatgaaatcgcgcagatcatgcaggagtcgctgtcgcggcggacttacacgatgtcattgatggcgatggtttttttgcccagcaccttcctgaccggtctgtttggcgtcaaccttggcggcattcctggcaacagctggcatcttggcttttcgatattttgcgtaatgttagttgttctaatcggtggtgttacctggtggttacatcgtagtaaatggttgtaagaaattgtcttttcaggtgattttgccgctgaaactccggcaatatttgagcgaaatcaataaaccatctacccattcagggcaatatctctctcgcaggtgaatgcaacgtcaagcgatgggcgttgcgctccatattgtcttacttccttttttgaattactgcatagcacaattgattcgtacgacgccgacttcattgagtcggctttttttttgccctctgccagctaacttctacgcttaaagaatagtcctgtaaagagaggggataaaatatgcgtaacatggcgctgtccttgcagtcgatacccatcggccctgagcccaatgacccggtgccggtgcccgatccgcggcctcgcccgcacccgcttcccgacccgccgccggacgatgacccgattaaattgtcgcatcaagagcggagatctgcgaggatacgcgcctgcagattgtccgccctttaatgcgagaaaacattgtgaccgctttttcaacactgaaccctttgcccgaagctcaactgaacaaccttaacgaactgggatatcacgcaatgacgccggtgcaggctgccgcattgcctgcgatcctgggcggaaaggatgtgcgcgtacaggcgaaaaccggcagcggtaaaacggcggcctttggtctgggattgctacagcacgttgatgctggtctgttccagacccaatcactggtgctgtgcccgacccgcgaactggcggatcaggttgccggcgagctgcgtcgtctggcgcgttttctgcctaacattaaaattttaacgctctgcggcgggcaaccgttcggcgcgcagcgcgattctttgcagcatgcgccacatattatcgtcgcgacgcctggccgcctgcttgaccacctgcagaaggggaccgtaacgctggacgcgttgcagacgctggttatggatgaagccgatcgcatgctcgatatgggctttagcgatgctatcgatgaagtgattcgttatgcgccagcttcgcgccagaccttactgttctccgcgacctggccggaagctatcgccgcaatcagcgggcgggtgcagcgggatccgcagacgattgaaatcgatagcgttgatgcgctgccgtctattgaacagcagttcttcgacgtttcgcaaagcggtaaaatcaagctgctgcaaaaattgctcagccagcatcagcccgcttcctgcgtggtattttgtaacactaaacgcgattgtcaggcggtatgcgatgcattgaatgctgccgggcagagcgcgctgtcgctgcatggcgacctggagcagcgcgatcgcgatcagacgctggtgcgttttgccaacggtagcgcgcgcgtgctggtcgccaccgacgtggcggcgcgcggcctggatatcaaatcgctggagctggtggttaactttgaactggcgtgggatcctgaagttcacgttcaccgtatcgggcgtaccgcgcgcgcaggcgaaagcggcctggcgattagtttctgcgcgccggaagaggcgcagcgcgctaacattcttgccgaaatgctgcagataacactcaactgggttaacgcgccggcgggtaatcatattgcgccgctgcaggcggaaatggcgaccctgtgtattgatggcggcaaaaaggcgaaaatgcgtccgggcgatgtgctgggggcgttaactggcgatatggggtttgatggcgcggatatcggtaagatcaatgttcatcccgcgcatgtttatgtcgctatccgtcagggcgtggcacagaaggcgtataagcagctgcaaaacggcaagatcaaaggcaagtcctgccgcgtacgtttgctgaagtaagggcggcaagtgacggtctccggcgcttgccggagacgtgttgcctgttattttacttcaaccacattcagacgcagttcatctaactgagcgtcttcttcttccggctgccagcccgcaggctgcagcgggatctcttcgcggtcaaaggccagatcgccgccgtcaaccaccgcagaaccgtgtgtgatggatttaaaatcaaacagattgacgtcgctcaggtgcgacggcaccacgttctgcattgcgctaaacatggtttcgatacggccaggatagcgtttatcccaatcgcgcagcatatcggcgatcacctgacgctgcaggttaggctgggaaccgcacaggttgcaaggaatgatcgggaagcctttggcctgcgagaagcgttcgatatctttttcgcggcagtaggcgagcgggcggataacgatatgtttgccgtcatcgctcatcagcttcggcggcatacctttcattttgccgccgtagaacatgttgaggaacagcgtctgcaggatatcgtcgcggtgatggccgagcgcgattttggtcgcgcccagttcggtcgccgtacggtagagaatgccgcgacgcagacgagaacacagtgagcaagtggttttgccttccgggattttctctttaacgatgccgtaagtgttctcttcgacaatcttatactcaacgcccagctgttccagatacgccggcagaatgtgctccgggaagcccggctgtttctgatcgaggttaacggccaccagcgagaaagaaataggcgcgcttttttgcaggctgcgcagaatttccagcatggtatagctgtctttaccgccggaaagacagaccataatacggtcgccatcttcaatcatgttgaagtcggcgatcgcctcaccgacattgcgacgcagtcgtttctgcagtttgtcgatgttgtatttttcttttttactaatttcttgattttgcagcatttaatagtggctcaattcatagtgtggcatcagaagagcacgcgttgtgccagtcgctggatctatccccgctggcgcgtagcaatgagtgaggtctgatagaaaaccgtggcgtgtatggtacggattcgggggggcaatgtcagcatctttccggcactttaatacgcgaggagtaaagataataaagcccgccgggcggcgggcttgggattacctgacgaccagcaccgagcactcggcatggcgcaccaccgccgcggcgttagagccgagcagataggtagtaatgtccgggcgatgcgaggcgataatgaccaggtcggcgggcagcgatttagccagcgccagaatcttatcttttggcgagccctcggcaacgtggaaatgcattctgtcttccggaatggcgaagccttttgccagctcacgcaactgcgcttccgattcggcgcgtagttcatccatagccggcagttcagcggtataggccatgcccagggaggcgtagtagggtagcgaagggataacggtgaggaaatgcacctgcgcgtcatcgacgcgtgcttcggattcaacgtggcggatcactcgttgagtaaattctttatcagaaatatcgatgggtaccagaatcattctactcataaaacctcctgttttaataaccaccaaaacagtatgccatcaggattgaggttctactacagcgtgaatcacaaattgctacgggaaccgctattttattggcggttgaagcgaaatgcccgccgcgagcggcgggcgcaagcattagaactgatataccagacccagtgctacgatattgtcggtagaaataccgttgtctttatagaagtcgtcattaccgtcgagcaggttgattttgtaatcaacgtaggtggacatattacggttgaagtaataggtcgcgccgacatccatatatttaaccagatctttatcggagtactgacccatataactcaggtctttgcctttggattgcaggtaagagatcgccggacgcaggccaaagtcgaactggtattgtgcggtgacttcaaagttctgcgtcttattggcgataccaccgccatgatcgctgttggtagaaccatatggcgtcatattgcgggtttcagaatacatagtcgccagataaacattgttggcgtcatattttagacctgcagtccaggcatccgctttgtcgcccttggcgtagcgatcgccaacagtatagttttgctgggcgttagtacgatcggatgaggtatatgctgcgccagcgctgatgcccatgcctaagtcataggtagcagaaagaccgtagccgtcgccgttgtcatagcgcacatcattgtcgtcaatgctgccacggttgttggtaccaacgtcttcgttagtccctttactttcgtttttaccctgatactggagcgcgaagttcaagccgttaaccaggccgaagaaatcgctgttacgataggtcgcgacaccgttggcgcggccggtcataaagttgtcggcctgagtataagagtcgccgccgaactccggcagcatatcggtccaggcttcgacgtcgtacaggacgccatagttacggccgtaatcgaatgaaccgtagtcgcctgctttgatcccggcgaaagccagacgagtccatgcctgatcgccagagctttcagtattgttagcctgaacgttgtattcccactgaccgtagccggtgagcatatcgttaatttgcgtttcacctttaaagccgaagcgcaggtaggtctgatcgccgtctttactggagtcgctggagaaataatgtaaaccgtctaccttgccgtagagatctaatttgttgccatctttattataaatttctgccgcgtgagcagcgccggcagccaataatgccgggataaccaatgccagtgcttttcttttcatttggatattcctttaactatttttgttttaacttcctgggtggaagtacggccatgctaaaggagcgcattctgatatgataagtatcaattgttacaatataagtaaattctaaagcaaataaatatacagtaatgataatttcccgcatgaatataatgtgaggatgtatataaaataaaaattatacatcatcgtttgaatatcgtattctgcctgggttatatgcctttattgtcatttaaaatttatattgttgccgtctcattcatatcgaatgattaattcgtcggaaaatgacaagcccgaatagttttactattcgggctttttttattgcgccagatatccgtcagccgggttaactttcggtggtcggtttctccgctttacctgccagctgggccaggaagtcatagcgtttttgcaggtcggcggccgcgtccttccacaactgctcggcgacttccggctgctgggcgttcagacgacggaagcgttgctcgttgagcagcgtttccgccagcgcatccgacggcggacgcgagtccagcgccagcggcagcttgccttcatcggcgcgacgcgggtcgaagcggtacagcggccagaagccggttgccgtcaactggcgcatctggtcgtggctcaacgccaggtcatagccgtgctcctcacacgggctataggcaattatcaacgatggacccggataggcttccgcctcctgaatcgccttcaccgtctggttaagctgcgcgccgagtgaaatctgcgccacataaacatgaccgtacatcatcatgcttacgccgagatccttgcgcgccttacgtttgccgtgctcgccaaacttggtgactgcgccgagaggcgtcgccttcgatgcctgaccaccggtattggagtaacattgcgtatcgagcaccaggatattgacgttttcggtcaggctcagcacatggtcaagaccgccaaagccaatatcataggcccagccatcaccgccgataagccagactgatttctcgactaacgcatccgcatcggtgagcagctcttcggccccttcgacccccgtcagcgcctgacgcagctcggcgacctgttggcggcgcgcttccggcgacgcttccgtatgcagcgcggcgttcaattcggccgggagtttatcggcaaattcgctcaacaaccgcatcacgcgctggcggtgttggtcgacggttaagcggaagcccaggccgaattcggcgttatcttcaaacaacgagttggcccacgccggaccacggccgttagcgtcagtggtataaggcgttgaggggaggttgccgccgtaaatggacgaacaaccggtggcgttggcaatcaacatccgatcgccatacagctgggtcaacagtttgatatacggcgtttcgccgcagcccgagcaggcgccagagtattcaaacagcgggctaattagctgcgaggtgcgaatatcaatgcgctcaagtttggtgcgatcgatttccggcaggttgaggaagtagtcgtaattgactttctcttcttcaacgtgctcaaggcgcgacatcatattgatggccttgatgtccggattctggcgatctttcgccgggcacacttcgacgcacaggttgcagccggtgcaatcttccggcgcgacctgcagaacgtatttctgcccgcgcatatcgcgggatttcacatccagcgagtgcaggctggctggcgcgttttccatctcttgcggagcgaccactttggcgcggatcgccgaatgcggacaggcggcgacgcagtggttgcactgggtacacagctcttccttccagatcgggatctcttcggcaatgttgcgtttttcccaacgggtggtgcccatgggccaggtaccatctggcggcagcgcggagaccggcagcgcatcgccaaggccggcaagcatcgccgcggtgacggttttgacaaagtccggcgcggcatcggagaccactggcggacggttggggctgctggcgttaaccggctgcagcggcacttccgccagcgattcgcgggccagcgccagcgcctgccagttgcgttccaccagctcctggcctttgctgctgtagcttttggcaatcgcaccctgtagttcggccagcgcgctgtcgcccggcaggatttgggttaaatggaaaaaggccatctgcataacggtgttgatgcgcgcgccaaggctgcactcacgggcgattttcgccgcgttaaccacataaaagcgcgcctgcttttgattcagcgcggcctgtacttcctggggcaggcgggaccatacctcatcagcgctgtagggggtattgagcaggaaaatgccgccgggcttcaaccgctctaccatctgatatttatcgataaactgcagttggtggcagccgacgaaatcggcctgcgagatcagatacgacgagcggatcggtttttcgctgacgcgtaggtgcgagacggtcaggccgccggccttcttcgaatcatagacaaaatagccttgtgagaaccacggcgtggagttgccaataatcttgatattgttcttggtcgccgagacgctaccgtcgctaccgaggccgtaaaacagcgcttccagcttcgcttccgccggtagcgtattttccgccagcggcagcgaaaggttagtcacatcatcataaatgcccacggtaaagcggggttttggctgtgcggcctgtaattcattaaagatggccagcacgcattccgggccaaattctttggacgagagaccatagcggccgccgatagtacgcggtagcgtttcgcgctcgccgcggttgaaggcttccgccagcgcggtcatcacgtcgagatacaacggttcggcaagcgcgccaggttctttggtgcgatccagtacggcaaccgcgcgggcgctctccggtagcgcctgcagcagatgcgtggcggagaacgggcgatagaggcgaactttcagcacgccgactttttccccacggctcagcagttcatccacgacctcttcacaggtgccgatagcggaccccatgatgacaattacccgttccgcctgcgggtgaccgtaaaattcgaacggtttgtactggcgaccggtggcggcggcgaaatcattcatcgccgtttcaacgtgttcgtataccgcgtcgtaccacgggttggtcgcttcacgggactggaaataagcgtccggattggcggaggtgccgcgaatgaccggatgctccgggttaagggcgcgttggcgatgctcggcgattttattctgcggcagcagggaacgaatggtgtcatccgccagcggcgcgattttgttgatttcgtgcgaggtgcggaaaccatcaaaaaaatggataaacggcacccggctttgcagcgtggcgatatgggagatcagcgcgaagtcttgcgcttcctggacgctgctggcgcacagcatcgcgcagccggtctggcgcacggccatcacgtcggaatgatcgccgaaaattgatagcgcgtgggtggcgacggtgcgggcggcgacgtgcaggacaaatggcatcaactggccggccaatttatacagcgtcgggatcatcagcagcaggccctgcgatgacgtaaaggaagtggaaagggcgccggtctgcagcgcgccgtgcacggcgccgatagccccggcttccgactgcatttcgaccacgcgggggacatcgccccacacgtttttcagcccatcgccagaccaggcgtcagcctgctccgccatcgttgaactgggcgtaatcgggtagatggcgataacttcactcgtgcgaaacgcgactgaagcgaccgcgccattaccgtcaatcgtaatcataagaagacacccttacattgcgcaaaaagaagggacccgtgaaacggcgacgagtcctgtaattatgctttcattttagcaaacgcccgccgcggccattttcgcatttgtgtccttgggaatgtccttatctatgtttggatcaattttttggcggaaaaacaaaaatatgactggtaaagggtcgaagaaggtgttgacggatacctacgctgcaccgcttaaacaaagcaaaatctatttttaaatttaatagcttttagccaaccggcaatcgcgtgctatttatttgctgcggtgaattcccctctgcggcggagcgttcagttcagtctcctgttggcgaaaattagcacgcgaattagttcgaactggctaattcaccgggaggcacccggcaccgcaatcaccattcgcaaactatgaaacccgatcgctgcaagcgtgattttttcgtcgggaaaatatttagcgctggaatgaaagccgcgctgctgcggcgctttgcctgacgagatcaagctttaagcggaaaatttgctagaaaatgttaatgaggcgcataaatacgtatttcgcctctcgacggcaggcgctgcgctgcctattattcttgagtttgtttattctaagatgtttctgaagggggagaggatgcgagctgcgtttttagtgggatgtgcggcattattactgtcggcttgtagtaacgagccggtgcaacaagccaccgcggcacacgtaccgcccggcatgcgcgcggcgatgagcgacagcggccaggcgaattgcgcgatggttggcggttcattatcggttgcccgccagcttgatggcaccgctattggcatgtgcgcgctaccgaacggtaaacgctgcagtgagcaggccttagcgggcggaagctgcggaaactactaatacgcaaggcgtgtggttacattaaatcggcgagtttatataccagcgattggtcggcggtcgccagcgtgagctgattctccgtcagatcgacctgcgcgccatcgcgcagcattttgctgagggtattatccagcgcgttccgttgtggatccgcgcacagcttacgcgtcatcgccagctgttcaacttttagctcgccgtctgacagcttgccctcgccgctgaagccattgcacatcgtgcctgacacatacattttttcgccgaagctaatttccggcggcggcgtctggcttgccggtagcgcctggccgttaacgctggtcagcacaaaacggtgatgttgtagttgttcggcgttggtagaaactttgctgttgtatacgcagcccgatagcagcatgcccgccgccagcagtgcagcaaacttattcattcgtactccaaaacatttgtcatatcaataaaacgaaaaacagtgtaactgtaatgcaggcaggatctgtggggattgtctgaatgtgccccccgttagcggggagcacaaaaggggaaagaagcttagaccagcgcgttcgggcaggtttcgcccttagctacctgctgcagattgccaagcgttgtctcggaaataccgatcagcgcctcagccgtcaggaacgcctggtgcccggtaaacaggacgttgtggcaggcggagagccggcggaacacgtcatcctggatgacatcattcgatttatcttcaaagaacagatcgcgttcattttcatacacgtccattcccagtgcgccgattttctgatgcttcagcgcgtcgatagccgcttgtgaatctattagcgcgccgcggctggtattaatgaccatcacgccgtctttcatctgatcgaatgccgcctggttgagcaggtgatagttttcgttggtaagcgggcagtgcagggagatgacgtcggactgcgcgtacagcgtcggcaggtcgacatattcaacgccgagatccagcgccgccgcgctcgggtagggatcaaacgccagcaggcgcataccgaaacctttgaggatccgcagcgtcgcgacgccgattttaccggtgccgatcacccctgcggttttgccgtacatggtgaagccagtcagcccttccagcgagaagttggcatcgcgggtacgctgataggcgcggtgaatgcgacggttcaacgacatcatcataccgatggcgtgttcagcaacggcttccggcgagtaggccgggacgcgcacgacgcgcaggcccagctctttagcggcatcaagatcgacgttgttgaagccggcgcagcgtagtgcgatgtatttcacgccgtgggcttttagctcttccagcaccgggcggctgccgtcgtcgttaacgaagatacataccgcttcacagccgttggccgttttcgcggtcttttcggtcagcaggaagtcgaaaaattccagttcaaagccgtatgcgtcgttaacatgctgcagatactttttatcgtactgcttggtactataaacagcgattttcataaggctttcctctagtgataataccgtcacggtagcataattaaaataatcttacaaatattaaaaattagtttaatcatcaggttatgatattaattctagagcatatcgtagtcttaagaaatctctttaaaagacaatacgtttcaccaaatactgaggctgaatgcccccggcgccagcaggatcaatggccagagtaaacccgatgccacattggcaacctggaaacgccatagcggtgtaccgctggcgccggtgaccagcggtaacgttgcgcgcagcggcgacagaaaacggccgaagaaaaccgcccaaccgccgtgacggcgcaggaatagctggctacgcagcacgcgttcggcgctgagccagcgcaggcgttgcagatgatgctgatagcgccggccaatttgccatgagagccagaatccgccgattgcgcccaggctggcgcttagccacattaacaggaaatgaccgatgctggttgaggcaagagctccgagcaccagcaaacccgaggtaccggggatcacaaaagagatgagggcgcaggatttactgaaggtcagcagaaaaacaatcagtaataccaatgaataatggctctgggcgcgttcgatcagcgagataatgagctccacggaataacggctccttattacctgtttttccaagtgtcgcaggcacaatttaaacgaagtctaaatagttattcagcagaaatgagtgcgactatccttaatcaggacgttaactttcactcgcgggtcgaacgtgccacaataggcgcctatcggcttttacttagaatcaggatttgactgcccatgaagggtaaatataaagccgctcttgcgctgttattagctctaattttgctgccgttggccctgttggccacattaacgcattgggttccgacgctggcgggtatctggctgccggtcggcacgcgtatctcgcttagcgaaagtccgcgcctgacgcgctcctcgttgattatccccgatttacgctacctggtgggcgattgtgaaattgctcgtgtcagcaatgcgcgccttacccgtcccagccgctggcggctacacctgagtgaactggatatcaatagcgcctgcctggctaagctccccgccagcgagccgctctccggcgcgccgcgaaccctcgccgagtggcaatcgatgttgccttatagttggttaactatcgacaatctgcgcctgtcgccgtgggaaaaatggcaggggaaactggtgatgtcgttgacgcctgggcagcaggatatcggttattcaggcaaagaggtcacattacaggcgaaactgcgcggccagaccttaacggtcagcaatttcagcgcgcggctggtagaagatcaggcgccggttaagctggtcggtgaattcgaaatgccgctggtgccggatggcctaccggtcgatggccatctggtcagcaccttcgaattcccgcaaatgccgggtctggtggatgcggaactggaatggcagaaaaaccgcggccagctgctggtcacgccgcgcggtgaggtcgagccgatgctcgacctgccgtgggagatcacccctgaacgtatcaccatcagcgatgggcgctggaacacggtgtatgccggctatccgcttagcgggcgggtggcgctttcgtttggcgactggcagaaaggcaccgaggagatggaaatcagcggccggctcaacgtgttaacgcacggcgaagcgggtaaaggcaacgccgtgctgaatattggcccaggtaagctaagcatggaccacagcgacatgccgctcagcctgaccggcgaggccaagctcgacgatatgattttttatgccgtgctgcccgcaaaactcagcggcccgctgatgacgccagagctggctttccatcccggcgcgctgctgcgttcacgcgggcgggtgattgactcgctgaacatcgatgagatccgtctgccgttggcgggggtgaaagtgacgcagcagggggtggatggccgcctgcaggcgatactgcgcgcccatgaacaggaaatgggcgattttaccctgcatctggatgggcaggccgacaattttatgcccgaccgcggtcgctggtcgtggcgttattggggcgatggtcacttttcgccgatgcaggcgcgctgggatgtgaaaggcgccggtgagtggcgggatagcgccattattcttaacagcctgtcgaccgggttcgataagctacagtacggcaccatgctggtcagcacgccgcgcctgaccctcgataaacccattcactggctgcgcaatgaacagcatccaaaattcagcggcacgttgtcgctggatgccggtaaaaccaccttcagcggcggcagcgttctgccgccgtcaacgctcaaattcaatattgatggccgcgatccgacctggttcctgtttaacggctcattgcacgcggagaaaatcggcccgattcgtctgaccggccgttgggacggcgaacgcttgcgtggccaggcatggtggccgaaacaggcgctaagcgtattccagccgctgatcccgccggactggaaaatgaccctaagagaaggtgatatgtatgcgcaggtagccttttccgcagcctccgggcagggctttgaggccgggggccatggcgtcttaaaaggcggtagcgcctggatgccggacaaccagatcaacggcgtcgactttgttctgccattccgcttcagcggcgggagctggcagctcggtacccgccgtccggtttcactgcgtattggcgaaatcgtcaaccagttcaccgccaaaaatctgagtgccgatctccagggaacatggccctggagcgagcaggatccgctggaattgagcaacgttaatgttgatatccttggcggcaagctgtccatgcagcagctaaggatgccgcagcatcaaccggcgctgctgcgtctgcagaatatctccagcagtgagttgataagcgccatcaaagtaaaacaatttgcggtctctggcgcgtttaacggcgcgttaccgttatggctgaacaacgataaatggatcattaaagacggctggtttagcaaccccggcccgatgaccctgcggctggataaagacaccgccgatgcgttggtggccgataacgtctccgccggcgcggcaattaactggctacgctacatggaagtctcgaaatcatggacgcgcatcaaccttgataatctcggcaagctgacgatgagcgcggcgattagcggcaccagccgggtggacggaaaaagcagcaccgtgcatttaaactatacccatgaagagaatattttcgatctgtggcgcagcttgcgcttcggcgataatttgcaggcatggcttgagcagaatgcgaaactgcccgccccgcgctgtacggatacatgtaaggaaccaaaatgataaaactgttcgccgcggcgctggcgaccctgctgctggcaggctgtacgccgcgtattgaaatcgccgcgtccaaggagccgatcaccatcaatatgaatgtcaaaattgagcatgagattcatattaaggtggataaggatgtcgaaaatttgctgaagtcacgtagcgatctgttctgaggcgataatgagaaaacgactgctgactgccaccctggcgttaatgctgttgagtagcccggcgctggcgctgaccttgaatgaggcgcgggcgcagggtcgagtgggggagacgctgaacggctatctggcgccgctgaaacaggatgcgcagacgttggcgttagttaaacagattaatgccgcgcgcagcgaaagctaccagcaactggcggacgacaataatctgccggtggatgaggtggcgaaaatggccggacagaaactggtcgcccgcgcacagccgggagaatatgtgcaggggattaacggtaaatggttgcgcaaatagttaacgatagcgcttgcggtattcgccaggcgacacgccgaagcgctgcttaaacgccgttgaaaaatggctatggtcgctaaagccccaactgtagccaattcccgccagtttctcttcgtcgtgcgcgttttgtaacgcccgggcgcacaggtcaagacgccggtttttaatatactgcgcgaccaccagacccttatcggcaaacaggcggtacaggctgcgtaccgacatgccggtttccccggccagccactccggacgcagctgttccgactgtatcgactcatctatcaacgccatgatcttttgaaattgcttgtcgcggcgcgtcggcggcgcgtcctgttgcagcagcattgggcgtaacaggcagatgatagcctccagcgccgcttcgccttcgctttctgagagcgccgggctgcgtaaactttcttgcagcaaccgctggctgagctggaccatcggcagcgttttattcagccgggtggcgatgctgatgtcgccgccgtgcagctggctttccacgagctggcggggcagcagcagcgaagcctgttttgacgtgtgttgccagaagatagaacagggacgcgaggcatcaatgagcgtgatatcgccggcttcgagcgccacctggcgctcgtcctgctcgatagccgcctggccttcgagctgaaaaacggtatagaaccaggcgtcgttgtcgcgtttgatttcgttacgggtgcggtaaagattgacgccgcgggcggtgacggtactgactttgagactaccggtatagcttgcatcaatctcgccatggaattcgtcgcccagcggacgggcggcaaaatggccgcatacctgattaatcttcgctaaccaacgctgatagtcctgcccgctttctaccgtcgccattgtctgcaccttgtaataatgatgtttctgcattgttgcatttatgctgtgagtggcaagagcgcagcgtggagtatatgaaagaactattacctgcggcacatttcaccgcctttctgggtgcttaattgcgggacctgtcacagcggcaacaacgattgtcacagagaaaaaagcgcaaatggctgacccgtcctagactgtgttcacttatccgcgaacaataaggaagtcgcatgtccacatcacaggtcgcgctgctcgccagcgtacagcagtttctcgacagacagcatggcttatatattgatggcaaccagcaggcggcgcagagtgaaaaacgcttaaccgtctgggacccggccaccggccaggcgattgccactacggcagatgctaatgccgccgacgttgaccgcgcggtgatgtccgcctggcgcgcttttgttgcccggagctgggccgggcgcacgccggccgaccgcgagcggattctgctgcgtttcgccgatctggtggaacagcatggtgaagagctggcgcagctcgaaacccttgaacaggggaagtcgatcaatatttcgcgcgcgtttgaagtcggttgcaccctcaactggatgcgctacaccgccgggctgaccaccaaaatcagcggccgtacgctggacgtttccattccatttccggaaggcgcgcgctatcaggcgtggacccgtaaagagccggttggggtggtggcggggattgttccgtggaacttcccgctgatgatcggcatgtggaaggtgatgccggcgctggcttccggctgttcaattgtgattaaaccctccgagacgacgccgttaacgttgctacgggtagcagagctggcaacggaagccgggatcccggatggcgtctttaacgtcgtcaccggcagcggcggcgagtgcggcgccgccttaaccacccatccgcaggtggcgaaagtgagtttcaccggttcgaccgccaccggcaagcatattgcccgcgcggcagctgaccgtctgacccgcgtaacccttgaactcggcggcaaaaacccggccattgtgctgaaagatgccgatccgcagtgggtgattgaagggttgatgaccggaagtttcctcaatcaggggcaggtatgcgccgccagttcgcggatctatatagaagcgccgctgtttgataacctggtggcaggctttgagcaggcggttaagtcgctgcaggtggggccgggaatggttgaaacgacgcagattaacccggtggtgtcgcaggcgcactgcgccaaagtggccgcttatctggatgaagcgcgtcaacaaaacgccgagctgattagcggtaacgttgggccaaatggcaacggtttttatattgcgccgacgctggtgattaatccggatgccgggctgcgcctgaatcgcgaagaggtgttcggcccggtggtaaacctggtgcgcgtcgccgatggcgaagaggcgctacgtttagccaacgacagtgattttggcctcaccgccagcgtctggacccgcgacctgacccaggcgctgaactataccgatcgcctgcaggccggtacggtatgggttaacagccatacgcttatcgatgccaacctgccgttcggcggaatgaagcagtccgggaccggacgcgacttcggcccggactggctggacgactggtgcgaaaccaaatcggtgtgcgtgcgctactgattttttgtcgaatggcgctacgcttatccgacctacagcgcagtgcgctttggtagcccggagaaggcgcaatgcgcctcttccccctgagcgctgatttgctatgatcggcgctcttttttctgatgttgccccgctatgtggaatgatgcgctttgctatcagcagtacggcgcgccggaaacggtgctcgcgctgtatcacctgccgttgccgccgctggcgcccggacttgttcgggtacaaatgcgctatgcgccggtcaacccttccgatctgattcccattaccggcgcttaccgccatcgtacgacgctgccatcggtggcgggctatgaaggtgttggggtggtagttgaagactcgacaaacggtcgcccacttctgggacaacgggttctgccgctacgcggcgccggaacctggcagcgttatctcgatattgacccgcgctgggtggtgccggtcgctgaagatattgatgacatcctggccgcgcgcggctatatcaatccgctgaccgcgatgctgatgctcacgcgctggccggtagcggggaaacaggtacttttgaccgccgcttcatcgtcctgcgccagcctgctgggacagtgggcgctcgccatgggcgcgcgttcggtcagcggtattattcgttcgccgcagcacatcgcgcgcttacagcaatatggcgtctacccgctacttgaaggcgatagcgcgctgattgaacaagtaagccagtacagcgatctggtgtttgatgcggtgggcggtgagctggcgaattttctgctggcggtactgccgcagacgtcaacgctggtctcttacgggttattatccggtaaaccgctcacccagacgcgaggctgcgcagcggtacgcaaatttcatctgcgggaggccttaccgacactcagcgttgatgcgtggcaggcggcgtttgccgggatctggcgacaactgccgaccacggcgcagcccgccgcgcaggtgataaagctgtgcgactggcgtgaggcgattgtcgccgcaggccagccaggaagaggcggtaaaatcctgctcgatttcaccgcgggctaagattactttttcttctcgccaagcgttggggtttcgtcaaagaagttccacggcttgagtagcgcatgcgcccattcggtcggcatgatcggccactcttcggcgcgcgcgacgtgagtggtgccggtggtaatccacacgacgtcgtcgtggttagtcagcgactcatcatccttcgcgtactggcctaagccggtatcctgggcggaacggttagggtatttcccttccggataacgctctgtcgggtggtaacgcgtcacccacagctgtttatccataaagctcagacgatgatatatccactcgtccggggcgaacttcgcgccggtcgccgccggatgcgtgccgccggcataagggataatctggtaagagaccgggttacccatgcggttctctttgctggtgttgctcagcaggcggatagtgccagggtcgaatttctgcgccgctttctgctcgctatcgattgtgtactgattcacctgcatggtgctggtgcgcgggccgccggcggtgtttggcttcacttcaggatccatcgccaccagggtgttgttttcgccgtccacgtcgagatcgaggcggaaattataaatatgctggtgggtggtgccgacaatattatggtcgatcagcgttccgtagcgggtatcctctttggcgctgggatcatgcatggtcttcgccagcacgcctttcaccgcttcaatgccggtggcgccggcatcgataccgatggtgccattgtcgtggaacacccagtcaaagatataatcatagttcccgacggtactgatccagcgtatcaccagttcccggcgttcggtgctgacgttgggtttgcccatttccaggtgcttatactcaggcccggcatagcgttcgaatatggcgaccgcacctggaatagtggtcggtttgccggtgtaatcggcgatagtttcgtccagcagtaccgcatttgacggcgcatctttaccgcgaacaatcggcgatgttagggtgcccatgccgtaatcgccggagtccagataggctttgaaataccagccgacgtcagggtcgccgtaggggacgatcatcccgccgagtgaaccttcatacattacctggcgttttgtgccgttgtcgttgtaagtcaccgtcgagagaatgggcccgacgcgcgagttcaggcgcagatgaaaatcccagttccgccagtgaatggtatcgccggtgatcgtgtagtttttgccttccggttcggttatctccagcggtttcaccgccggggcgttgcggtcgcgaccatcatacggacgtggctccatcggtaccgggatcaccgggccttcttcgattttgatgattgtcttcgcttcaaggtcgaccaccgccaccaggttttcaatcgggtgcgcccagtagttgccgtcgccggtatccagataactgacgactttcagcagacgcgcatcctgctgcaggccatctttgccatcaaagtagccgacggtgagcggggtggtgaccaccttactgggatcggtaataccgtgctttttcagcacctcagcgaactcgctgctggcattgataatgttctgcacgctgacgaagtcatcaagcagtaccatcccatgggcgcctttaatcggcgtccatgagaggatttttttgttttgcagatcgacgacggcttcaatgacatgtttgccatcaagcatcaccacatcggcggtgcggggggaatcaacgggcgttccctgcagggcaaaggcccataccgccgctttatccggctcgtgtaaggaaatctcagtaaagcgggtattcggctggaactccggcgcggctttgacaatggtcactgcttcaccgatttccgccgccgagagcgaatttaacgggtgagggcgtttttctacctggaaggtctgatcgagaccggactggaatacatcgttgataaaggtatcggagacccaggctttaccttccttcattaccaccggcacctgtagatcaaggggtttaccgttgacgatcgccgttttggcgccgggttttactttgacgtaagcgccgtcttttatcagggtgaacatttgcgcgtagtcatcccactgcacatcggcgccgaacgcctgcagcgttttatccaacggcaccatgtgcgcttcgctaccgtgagcgaagaccggtgattgccaggcgcaaaccaccgcgacagccagcgccagcgcggttttacgaggggaaaacatcaagccgtttgccattgtgacctcatcttattgttgtgttgttgccgctgcgaatgtcggctttgttacgcttaccctagcagtctgccgcccgggaacgtttgtctgcttttgccagcttgtttgtcagttttgccagacggacgtaaaaaatgcctccgtagaggcattaagcgcgtgggtggtgcgtgttgactacgccgggaagtctccctgctggcgcgccaccagggttagaatggaatacagcgccaccgcctgctggtgctggttgaaaatctcgacagcccattccaccacgccggtggctttctcatcggcgctgcgctgacgtttgaccgttttccgcttacaggtcaggcgaacctgaatggtgtctcccggtttgaccggctcaataaagcgcaggttttccatgccgtagttggcgataaccggcccgacgccggcatcgacgaacagcccggccgcagcggagatcaggaaataaccgtggaccacccgctcgccgaaaatcgactcagcggcggcgattttgtccatgtgcgcgtagaaatgatcgccgctcaggcaggcgaaattaacgatatccgcttcggtcagggttcggcgcggggttaataagctatcgccaggctggatctcttcgaagtatttacggaacgggtgaatgcggtcttcatgcacctgagcgccgcgcacccactgctggcttatggtcgccagcatcgttgggctgccctgaatcgcggtacgctgcatatagtgtttcaccgaacgcagtccaccgagctcttctccgccgccagcacggccggggccgccgtgtaccagctggggcagcggcgaaccgtggccggttgattctacggaggatgcttcattcagtatctgaatacggccatgcgcgcgcgcggcgccaaggataaactcgcgcgccagctcgccgctggcggtgaccagcgtaccagccaggctaccgccgccggcgcgtgccagcgtgagcgcatgctggccgtcgcgatacggcatcagcgtcgctaccgggccaaaggcttcaatggcgtgaacctctggcgtttcatccggctgcgggcagtacagcagggtcggcgggaagaacgcgccatcagcattaagatctgcctgtccgccgagcagcgcttcacagccggcggcaatcagtttattgacgttatcctgcacatcctgacgctgttcgcgattaaccagggcccccatcttaatgccctcctgcgcagggtcaccgacggttactttatgcaggcgggagatcagtgcatcgctaaccgcattaatctgagccagtggcacgatgattctgcggatagcggtacatttttgcccggctttcgccgtcatctcgcggaccacttcccgaataaacagcgcgaattccggttgctccggcgtgacgtcttcacctaatacgcagcagttgagcgaatctgcttccatggtaaagggaatagatttggccaccaggttagggtgcgtccgtagctgctggccggtggcggctgagccggtaaaggtcaccacatcctggctatcgagatggtcgagaagatcgctcgcgccgccgcaaatcaggctgatggcgccttccggcaccaggccgctgtcgacaatcgctttcaccattgcctgggtgagctgggcggtagcggttgccggtttaatgatcgccggcatgccggcaagccaggtcggcgccagtttttccagcattccccagcaggggaagttgaaggcgttgatatggacggcgacgcctgattttgatgtcagcacatgacgcgcggcaaaaccgccctgtttggagagcgggatcagctcgtcttccggccacagaatatcgtccggcagttcgcggctaccgagcccggcataagtgaacaaagtaccgataccgccttcaatatccacccaactgtcggcgcgagtggcgccggtttgcgcggagatggcgtagaactcgtctttctgctccagcaaccgttttgctaccgctttcagcatcgcgctgcgttcaataaaggtcatcgcctgcagggctttgccaccgcgttcaatcgcgaaacgacgcgcctgcgccatatccaggccttcactggtcacctcccaaagcgccgcgccggtgatggcgtgatggatagtacgggcgcggccccggccggtctgccaggcgccggataagtaactggctaactgctgcatcgcaaatctccaaatgtgttacgcatgattactataaatagttcttttatgaatcataaaatgcaagtctatatttaatattttattaacattgtgatcggtggttaattggggtttttacttatgttactgttatgaatgctatttacaaaaggttttgcggttatcatcacaaaaagaacaaacaaaatttgtggttttatttaactaatatgtaaccttcaataaacaaagtgattcacataaatgtttttgttgtgaatatcggaatcataaaggtgatgacgtgacagaagaacaacgctttgaccagcgcatcgcgcaggaaacggccatcgaaccgcgggactggatgccggatgcctaccgtaagaccttgattcgtcagataggtcagcacgcgcactcggaaattgtcggcatgctgccggaaggcaactggatcacccgcgcgccgacgctgcgccgtaaagcgattctgttggctaaggtacaggatgaggccggacacgggctgtatctctatagcgccgcggaaacgctgggctgcgcccgggaagacctgtatcagaaaatgctcgacgggcagatgaagtactcctccatttttaactacccgaccctgagctgggccgatatcggcgtgatcggctggctggtcgatggcgcggccatcgtcaaccaggtggcgctgtgccggacctcttacggcccctatgcccgggcgatggtcaaaatttgcaaagaagagagttttcaccagcgccagggatttgaagcctgcatggcgctggcgcagggcaatgacgcgcagcggcagatgctgcaggacgctattaaccgcttctggtggccggcgctgatgatgtttggccctaacgatgacaactcgccgaacagcgcccgcagcatggcgtggaaaatcaaactgcactccaacgacgagctacgtcagcgcttcgtcgataacaccgtgccgcaggtagagatcctcggtatgaccgtaccggacccggatttgcagtttgatgaagccagcggccactaccgcttcggcgaaatcgactggcaggaatttaacgaggtgattagcggccgtggcatttgcaatcacgagcggctggccgccaagcgtaaggcctgggaagagggcgaatgggtgcgcgaagccgcgctggcccatgcgcaaaaacagcaggcccgcagcgcggcatgaggagagacaacatgagcaaagtttactggccgttatatgaagtgttcgttcgcagcaaacaggggttatcccatcgtcacgtcggcagtctgcacgctgccgatgatcaaatggcgttggagaatgcccgcgatgcctacacccgccgcagcgaaggctgctcaatttgggtggtgaaggccagcgaaatcgttgcttcgcagccggatgatcgcggcgaattcttcgacccggcggaaagcaaagtctaccgtcatccgactttctataccgtgccggacggcatggaacatatgtgaggcggtgatgaataatcctaaccccgtagccacctacgccctgcgtcttggcgacaatggtctggttctggcccagcgtttaggcgcctggtgcggccatgctcccgagctcgagatcgatcttgcgctggccaacatcggcctcgacctgctcggccaggcgcgcaattttttaagctatgccgccgagcttaacggctgcggcgacgaagatacgctggcctttggccgcgatgagcgccagttcagcaacctgctgctggtggagcagccaaacggcaattttgccgacactatcgcccgccagttctttatcgatgtctggcacgtcgctctgttcagccgcctggtgaacagccgcgacacgcagctggcggccattgccgctaaagggctgaaagaggtgcgttaccaccagcgctttagccgcggctggctggagcgtctgggtaacggcaccgagttatcaaatcgcaaaatgcagcaggcggtcgacaatctttggcgcttcaccggcgaactgttccttgccgatgaagtggagctcagcctggttgagcagggcattgcggttgatccgcgcgagcttcaggccgaatggcaaagcgcggtacacacggcgctgctcgactccggcttacaaatcccgcaggaagcggccttccgcagcggcggcaaacaggggctgcacagtgaacatctcggcccgctgctggcggagatgcaatatctgcagcgttcgcatcccggactgcagtggtaagtgaggtgactatgcaacgtcttgccgatatcgctcctgcagaggttcgcaccatctgggggttattaagcgcgatcccggatccggaagtgccggtactcaccatcaccgacctcggtatggtacgcagcgtcgtgcgccatggcgacggctgggtgattggctttaccccgacctattcgggctgtccggcgacggagcatctgctgggcgagatccgtacggtcatgagcgagcatggctttctgccggtgcatatcgtcctgcagctggatccgccgtggaccaccgactggatgagtcaggatgctcgcgagcgcctgcgccagtacggcatcagcccgccccaggggcacgcctgccatgcggacatgcccgctgaggtgagctgtccgcgctgcggcagcacccatacttcgctgattagcgaattcggttccacggcctgcaaagcgctctatcgctgcgacagctgccgggaaccttttgattactttaaatgtatttgaggttgccatgacgacgttccattcgcttaaggtggcgagagtcgagccggaaacccgcgatgcggtgaccatcacttttgcgattccgcaagccctgcaggcggaatactgttttcgcccgggccagcatctgacgctaaaagcccgtctgggcggcgaagaactgcgccgctgttactccatttgtcgcagccgcacgccaggcgaaattagcgtcgcggtcaaagccatcgacggcgggcgcttctcgcgctacgcccagcacgatatccagcagggtatggagctggaagtgatggtgccgcaggggcatttcggttatcaaccgcaggccgaacggcagggtgagtatctggcgattgccgccggttccgggatcacgccgatgatggcgatcattagcgcgacgctggcgaccgagtcgcaaagccgctttacgctgatctacggcaaccgcagcagccatagcatgatgttccgccaggcgctggccgatttaaaagaccgctatccgcagcgcctgcaggtgatacacctgtttagccaggagtcgatggacagcgatctgctacaggggcgcattgacggcgacaaactgcgccagctcgctgaccatctgctggatttcagccgtttcgacgaggcctttatctgcgggccggcggtgatgatggacgaggcggaagcgacgttacgtgaacttggcgtagcggagaaatcgattcatctcgaacgctttaataccccaggcggcaatgtgaagcgggccgctggagtgcaggcggaagggcgcacggtgaccatccgtcaggacgggcgcgatcggcttatcgccctcagcgccgaagacgacagcatcctggatgccgcattgcgtcagggcgccgatctgccgttcgcctgtaagggcggggtatgcgccacctgtaaatgcaaagtgctacgcggtgaagtggcgatggccgccaattacagcctggaagcggatgagctggcggcgggctacgtgctgagctgccagtcgttgccgaccagcggcgatgtagtggtcgactttgacgcgcgggggatggcatgagtgacctgctgatccaccgtcatggccgggcgcttcagttgacgctgaaccgcccgcaggcccgcaacgcgctgaacaatgccttattaacccagattgccgaggtgctggaggccgcggcagttgatgacagcgtcggcgtctgcgttatcagcggtaacgcgcgttttttcgccgccggggctgacctcaatgaaatggcggaaaaagatctgcctgccacccttgatgatattcgcccacggttatgggcgcgaatcgatgcctttactaaaccgctcatcgcttcggtcaacggctacgcgctcggcgccggctgcgagctggctctgctgtgcgacctgattgtcgccggcgacaacgcccgctttggcctgccggaaattaccctcggcattatgccgggtgctggcggcacccagcggctgatccgcagcgttggcaaggcgctggccagccggatggtgctgagcggcgagagtattgacgcccgccaggcgcaacaggccgggctggttagcgatatccatccggcggctttaaccgatgagtatgccctgaaactggcaaccaccattgcccgccattcgccgctggcgctacgggcggcaaaacagtcgctgcgcctgtcgcaggaagtcagcctgcaggccggtctgcaacaggagcgccagctgtttagcctgctgagcgccaccgaggaccgccgcgaaggcatcgacgccttcttacaaaaacgtacaccggaatttaaaggacgctaatcgtggaagctttcattctcagcgcagtggaacagggcgtcatgaccattaccctcaatcgcccggaccgtctcaacagttttaacgatctgatgcatcaacagctggcggaatgtctgaagcaggccgagcgcgatgatggcgtacgctgcctgctgatcaccggcgccggccgcggcttttgcgccggccaggatttgaacgaccgcaatgtcgaccccagcggcccgccgccggatctcggcatgtcggtagaacgcttttacaacccgttagtgcgccgtctggcggcgctgccgaagccggttatctgcgcggtcaacggcgttgccgccggcgctggtgccaccctggcgctgggctgcgatatcgtgctggccgcgcgttcggccaaatttgtgatggcgttcagcaagctcggcctggtgccggactgcggcggtagctggttcctgccgcgggtggccggccgcgctcgcgcgatggggctggcgctgctgggcgatagcctcagcgcggaacaggccgcgcagtgggggattatctggcaactggtggacgattcagaactggcggataccagtctgcaactggcgcgccatctggcggcgcaaccgacgtttggtcttgggctgattaaaaaggcgctgctggcttctgaaaccaacagtcttgatgcgcagctggatcttgagcgcgattatcagcgcctggccgggcgcagcgatgattaccgcgaaggggtcagcgcgtttctggccaagcggccaccacagttcagcgggaaataggccatgacaacatccttagccaccgtggcggtgattggcagcggcaccatgggagccggtattgctgaagtagccgctgccgccggacatccggtgcgtattttcgatattaatcaaaccgcgattgcccaggcgatcgacggcattgctatgcgtctggcatcgcgggtcgagcgcggcaaactggcgtcagagcaggccgacgcgctgctggcgcgcctgcatccggcccacgatttagccgcgcttgccgacgcggatttagtaattgaagcggcctctgaacgcttggaggtcaaaacgacgctgttcgcgcagctggcggagatctgtgcgccgtcaacgttgttgaccagtaacacttcgtctatttcgattaccgccatcgccgccggggtcaaaaacccggagcgggtggccgggctgcacttttttaatccggcgccggtgatgaagctggtcgaggtggtgagtggcctggagacgtctgctgaggtggtagagcagctgtgccagtgcgtaagcggctgggggaaacagccggtacgctgccgctcaacgccgggatttatcgttaaccgcgtagcgcgtccgttctacgctgaggcctggcgcgcgctggaagaacaggttgccgctcctgaggttatcgatgccgctttgcgtgacggcggcggttttccgatgggaccgctggcgctgactgacctgattggccaggacgtcaacttcgccgtgacctgttcggtgtttaacgctttctggcaggaccgccgctacctgccatcgctactccagcaagagctggcgctggccgggcggctgggtaaaaagagcggccacggcgtctatcgctggcccgcggagacgcagccggacgcggcgctgccgacggtatctattggcgctcaatccattacagctataagtgacagtgtcacagagctcgatgagctcttattgctggagaccgaaggcgagaccgcgctggcgctaagcgttaagcatcaccgcccggtggtggtatatgacctgtgcgccagcgatacggtggtgctggcagcagcggcgaccaacgcgcctgcggccactgataaggccgtgcattacttccaacagcagggcaagaaagttctgcgtattgccgattatcccggcctgctggtgtggcgcacggtggcgatgctgattaacgaagcgctggatgcggtgcaaaaagggatcgccagcccgcatgatattgataccgcgatgcgccttggcgtcaattatccgcacggcccgctggcgtggggagaacgccttggctggcggcgggtgctgcaactgctggagaacctgcaacaccattatggcgaggagcgctatcgccccagttccctgttgcgccagaaggcgctgatggagaagcaccatgagcaatgatccgtggcgcaacgcgcgcgtgatgtacgaaaaagatacttgcgccagaaagatggggattgaacttatcgaaatggacgacggttttgcgcagatgagcatgaccgtctcggcggacatgcttaacggccatcagacctgtcacggcggccagctatttacgctcgccgataccgctttcgcttacgcctgtaacagccaggggctggcggcggtggcttcggcggcaaatattgattttcttcgtccggcgtttgccggcgacaggctggtcgccaccgcaagagtcaaacagcagggcaagctgaccggcgtctacgacatcgaaattgttaatcaacagcaaaagattgtggccctgttccgcggcaaatcgcaccgtatcggcggcacaatcacgggagaagtgtaatgcgcgacgcctttatttgtgacgggatccgcacgccgattggccgctacggcggagcgctggccggcgtccgcgccgacgatctggcggcgatcccgctacgtgagttgctgagccgtaaccccgggctcgacccggcagcgattgatgatgtgattttcggctgtgcgaaccaggccggtgaggataaccgcaacgtggcgcacatggcgacgctgttggcaggttacccgcataccgtgccgggcaccacgattaaccgcttgtgcggatcgggtctggatgcgatcggttttgccgccagggcgatcaaagccggcgatgccgatctgctgattgctggcggcgtggaatcgatgtcgcgcgcgccgttcgtgatgggaaaagccagcacgccgtatcagcgtcaggcggaactctttgataccacgattggctggcgttttgtgaacccgctcatggcgcaacaattcggaactgacagcatgccggaaacggcagagaatgtagctgaattgttaaatatcagccgggccgaccaggacgctttcgcctggcgtagccagcagcgcacggcgcaggcccagcgcgatggcattctggcgcaggaaatcgtgccggtgcagatcatcggcaagaaaggggcggtcagcgcggtacgcgatgatgagcatccccgcccggaaaccacgcttgagcaactcgcactattaaaagcgccgttccgtaaaggcggagtcattacggctggaaatgcttctggcgttaacgatggcgcagcggcgctgattatcgccagtgaacagcaggccagcgtacaggggctcacgccgcgcgcgcgtatcgtggcgatggcgacggcgggtgttgaaccgcgcctgatggggctggggccggtaccggcagtgcgtaaagtgctggagcgagccggactcaatattaacgatatggatctgatagagctgaatgaggccttcgccgcgcaggcgctgggggtgctcagacaactcggcgtgccggatgatgcggcgcacgtgaatcccaacggcggcgccatcgcgttaggtcatccgctgggcatgagcggcgcgcgactggcgctgagcgccagccttgagctgcaacgccggggcgggcgttatgcgctgtgtacgatgtgtattggcgtgggtcagggcattgccatgatcctcgagcgagtgtgagctaatttacctgcgagtaccctacaatgataactactacaaaattagatccgattgaaaccgcatcgcgtgatgaactgcaggctctgcaaacccagcgcctgaaatggacgctgaagcatgcgtatgaaaatgtgccgatgtatcgccgcaaattcgacgccgccggcgtacaccctgacgactttcgggaattaaacgatctgaaaaaattcccctgtaccactaaacaagatctgcgcgacaactatcccttcgatacctttgcggtgccgatggagcaggtggtgcgcattcacgcctcttccggcaccaccggcaaaccgacggtggtgggatatacgcaaaacgatattgataactgggccaatattgtcgcccgttcgctgcgtgcggccggtggttcagcaaaagataaaattcacgtcgcctacggctacggcctgtttaccggcggccttggcgcgcactacggcgcggagcgtttaggggcgacggtgatcccgatgtccggcggacagaccgaaaaacaggcgcaactgatccgcgactttcagccggatatgatcatggtgacgccgtcttattgtctgaatctgattgaagagctggagcgccagatgggcggcgatgcccgcggctgttcattgcgggtcggcgtctttggcgctgagccgtggacgctggcgatgcgcgcggaaatcgagcgccgcctgggtatcaccgcactggatatttacggtctgtcagaggtgatggggcctggggtggcaatggagtgcctggaaaccgttgacggcccgaccatctgggaagaccacttcttcccggaaatcgtcaacccggacgacggtacgccgctggaagatggcgagcatggcgaactgctgtttaccacgttgaccaaagaggcgctgccggtgatccgctatcgtacccgtgatctgactcgcttgctgccgggaaccgcgcggaccatgcgccgcatggatcgcatcagtggacgcagcgacgatatgctgattatccgcggggttaacgtcttcccatcacagctggaagaggagatcctcaagtttgaacacctggcgccgcactatcagttagaggtcaatcgccgcggtcatcttgattcgctggcggtacgcgttgagctgaaagagagcgggctggcgttaagtcatgaacaacgctgccagatttgtcatcagttgcgtcaccgtattaagtcgatggtcgggatctccaccgatattactatcgtcaactgcggcagcattcctcgctctgaagggaaagcctgtcgggtattcgacctacgtaaagcggtggtcagcggttaattctctccccggtaacccggctgaggcctttacgccataagccggggttttcctgtgctatgattcataaaggaaaaatataacaacagaatgaatcagatgagtaaactcgacgcctttattcaacaagcggtgacggcgatgccgatcagcggtacgtcattgattgcctcgctgtatggtgacgccttattacaacgcggtggggaagtgtggctgggtagtgtcgcggcgctgctggaaggattaggatttggcgagcgctttgtccgcactgcgctattccgtctcaataaagaagagtggctcgatgtcgtgcgtatcggccggcgtagcttctatcgcctgagcgataaagggctacgtctgacccggcgcgcggaacataaaatttatcgggcgaacgccccggaatgggacggaacctggctgctgctattgtcggaagggttagaaaaaacggttctggcggaagtcaaaaagcaactgttatggcagggatttggcgcgctggcgccgagcctgctggcctcgccgtcgcaaaaactggccgatgtccaatcgctgctacacgaagcgggtgttgccgaaaacgtcatctgttttgaagcccattcgccgctggcgctctcaagggcggcgctgcgcgatcgcgtagaggagtgttggcatctcaccgaacaaaatgagatgtacgaggcgtttatcgcattgttccggccgttactgccgctgcttcgcgacagcgatccgtcagagttgaccccggagcgctgtttccagatccaactgctccttatccatttctatcgccgtgtggtgcttaaagacccgctgctgccggaagagctcctgccggcgcattgggccgggcaaaccgcgcggcagctgtgcatcaatatttatcaacgcgtgacgccaggcgcgctggccttcgtcggcgaaaaaggcgaaagctcagttggcgagcttcccgccccgggtccgctttattttcaacgctttggcggtttgccgggcgtctaaggaggttgcatgccgatttatcagattgatgggctgacgccagtggtgccggatgagagctatgttcatccgacggcggtactcattggcgacgtgattctgggaaaaggggtctatgttgggcctaatgccagcctgcgcggcgacttcggccgtattgtagtaaaagacggagccaatattcaggataactgcgtcatgcacggcttccccggccaggataccgtggtggaagaggacggccacatcggccacggcgcaatcctgcacggctgtgtgattggccgcaacgcgctggtgggaatgagcgcggtgattatcgacggggcagtaattggcgaaaatagtattgtcggcgcttccgccttcgtaaaagcgaaagcggaaatgcctgctaaccatttgatcatcggcagcccggcaaaagcgattcgtacgctgagcgaacaggagctggagtggaaaaaacacggtacccgtgaataccaggtgctggtcgaacgctgtaagcagtcgctgcatcaggtggagccattaaaagagatggaggccgggcgcaagcgtctggaatttgacgaaaacctgcggccaaaatcctaaacctgaggggtaactataatggcagagaaattatccgctcactgtcactgcggtgcggtggcatttaccgttgagctcagcgatggcttcaacaccgttcgtcgctgtaactgttcatattgtcgaatgcgtggggcggtcgcggtctcttcgccgcgttcaggaatagaggtggtacgcggaagggataagctcacagaatatcgctttaatacgggggaagccgtgcactttttctgctcggtatgcgggatctacacctttcatcaacggcgatcaaacccgcagcagtatggggtaaatgtggcctgcattgatggcgtttcgcctttcgattttccttgcgtggaggtcaacgacggcgtgaatcatccaaaagatggcggcggaggcgtggtggggtatttgcgctacgagaaaaagtaaaactctcctcccgcaggcagcgagaggagtcaaatattaggctgcaactacgctgtcgatagccgctttggcatcggactgcgctttggccgcaacttctggaccataagcaataccttcagcaaatacgaagttcacgtcggtgatgccgataaagccaaggaaggtggtcagatacggcgtaaccagatcggtcggcgtatctttatgaataccaccgcggctggtcagtactaccgcacgtttaccggtgaccaggccttccggacctttctcggtgtaacggaaggtgacgcctgcgcgggcaaccaggtcgaaatagtttttcagctgagtcgggatgttgaagttatacatcggcgcggcgataacaatcacatcgttagctttcagttcagcgatcagttcatcggacagcgccagcgcttcctgttgacgtgcggtcaactgtgcatcactcggacgcagcgcgccaaccagttcaccatccagaaccggaatcgggtttgccgccagatcgcgcacggtgataacgtcgcctgcgtgtttttcacgccattgttcaacaaaatagtcggacagctggccggattgcgagtaccctgcaagaatactggacttcagaactaatactttgctcatgggtgtttccttttaatgtgattgacgggtcaatgccctggtgcttgttgacactgtattcacaatcatgccgcagagatagcgcaatatatcgaatcctatgttcaatttttttgaacaaggcatgagttctacagatgtggtaatctacagcaatatttcatgagagatttttccggcagagcgctgcccgataacgttatgacagaacaacaaaaaatcactttctcgcagctctatgaacggctcgatggtctgatgctgcgcgataaatcgcgctatagccgccgcctgcatggcgcaaagaaggttaaaaatcctgatgcccagcaggccattctgcacgagatggcgcgggagatagagcaggcagcagggaaagtcctgctacgcgaagccgcgcgtccggcaatcacctatctggaaaacctgccggttagccagaaaaaacaagagattctcgaagcggtgcgcgatcaccaggtggtgatcgtcgccggtgagaccggttctggtaaaaccactcagctacccaaaatctgcatggagctggggcgcggcctgaaaggcctgattggccacacccagccgcgtcgactggcggcgcgcaccgtcgctaaccgtattgccgaagagctgcagagcgagccgggtggctgtatcggttataaagtccgcttcagcgaccacgtcagcgaaaacaccatggttaagctgatgaccgacggtatcctgctggcggaaatccagcaggatcgcctgctgatgcagtatgacaccatcattattgatgaggcgcacgagcgcagtctgaacattgattttctgctgggctatctgaaagagctcctgccgcgccgcccggacctgaaaattatcattacctcggcgaccatcgacccggaacgtttctcaaagcatttcaataatgcgccgattatcgaagtctccgggcggacttacccggtggaagtgcgctatcggccgatagtggaagaggcggacgataccgagcgcgatcagctacaggcgatttttgatgcggttgacgaactggggcgcgaagggcccggcgatatcctgatctttatgagcggcgagcgggaaatccgcgataccgccgaggcgttgaataagctcaatctgcgtcacaccgaagtgctgccgctgtatgctcgtttatccaatagtgagcaaaaccgggtcttccagtcccatagcgggcggcgtattgtcctggcaaccaacgttgccgaaacctcgttgacggttccgggcatcaaatacgttatcgatccgggtaccgctcgcatcagtcgctacagctaccgtacaaaagtgcagcgcctgcctatcgagccagtatcacaggcctccgctaatcagcgtaaaggccgttgcggacgtgtgtctgaaggcatctgtattcgtctttactcggaagacgatttcctgtcgcggccggaatttaccgacccggaaattctgcgtaccaacctggcctcggtcattctgcaaatgaccgctctggggctgggcgatatcgctgcgtttccgtttgtcgaagcgccggataagcgcaacatccaggatggcgttcgtctgctggaagagctcggcgccatcaccaccgatgagcaggcaacggcctataagctgaccccgctgggccgccagctcagccagctaccggtggatccgcgtctggcgcgggtggtgctggaagcgcagaaacatggctgcgtgcgtgaagcgatgatcatcacttccgcgctgtcgattcaggatccgcgcgagcgccccatggacaagcagcaggcatccgatgaaaagcatcgtcgcttccacgataaagagtctgatttccttgcttttgtcaatttgtggaactatctcggcgaacaacaaaaggcgctctcctcgaatcagttccgccgccagtgccgggtggatttcctcaactatttacgcgtgcgtgaatggcaggatatttacacccaactgcgccaggtcgtgaaagaactcggtctgccgatcaacagcgagccagcggagtaccgtgagattcataccgcgctgctgaccggtttattgtcgcatatcgggatgaaggactccgataaacaggagtataccggcgcccgtaatgcccggttctctatcttccccggctccggtctattcaagaagcctccgaagtggacgatggttgcggagctggtggagaccagccgcctgtgggggcgcattgccgcccgcattgagccggagtgggtcgagccggtggcccagcatctgattaaacgttcatatagtgaaccgcactgggagcggtctcagggcgcggtaatggcgacagaaaaggtcaccgtctacggtctgccaatcgtcgccgcgcgtaaggtcaactatagccagattgacccggcgctgtgtcgtgagctgttcatccgccacgcgctggtagagggcgactggcagacgcggcatgctttcttccgcgataacctgaagctgcgcgctgaaatcgaagagctggagcataagtcgcgccgtcgcgacatcctggtggatgacgagacgatgttcgagttttacgaccagcgcattagccacgatgtcatctccgctcgccactttgataagtggtggaagcaggccagccgcgaaacgccagacttgctcaattttgaaaagagcatgctgattaaagagggggcggagcaggtcagtaaactggactacccgaatttctggcatcagggcaatcttaaactgcgtcttagctatcagtttgaacccggtgcggatgccgatggcgtaacggttcatattccgctgccgctgctcaaccaggtagaggaagccgggtttgaatggcagatccctggcctgcgtcgcgagctggtcatcgcattaatcaaatcgttgccgaaacccgttcggcgtaatttcgtcccggcgcctaattacgccgaggcgtttttaggccgcgcgacgccgctggcgttgccgctactggattcgctggagcgtgagctgcgtaaaatgaccggcgtgaccatcgaccgcgaatcctggcagtgggatcaggtgcccgatcacctgaaaatcactttccgggtggtggatgacaaaaataagaaactgctggaaggacgctctctgcaggtcttaaaagacgcgcttaaaggtaaagttcaggagacgttatcggcggtggccgacgatggtattgaacagagcgggctgcatatctggagtttcggcaccctggcggagagttacgaacagaagcgcggtaattataaggtgaaagcctggccggcgctggtggacgagcgtgacagcgttgccatcaaactgtttgataatccacaggaacagcagcaggcgatgtggcgtggtctgcgccgtttactgttgctcaatattccgtcgccgattaagtatctgcacgagaaactgcccaacaaagccaaactgggactctatttcaacccttatggcaaggtgctggatttgattgacgactgcatctcctgtggtgttgacaagcttatcgatgaagccggcggcccggtgtggaccgaagagggctttagtaaactgcacgataaagtgcgcgccgaactgaacgacacggtggtcgatatcgcgaagcaggtcgagcagatcctgacggcggtatttaacatcaataagcgtctgaaagggcgggtagatatgacgatggccctggggctgtcggatattaaagcgcagatggcgggtctggtttatcgcggctttgttaccggcaacggtttccgccgcctcggcgatacgctgcgttatctgcaggcaattgaaaaacgtcttgagaagctggcaatcgacccgcatcgtgaccgcgcgcagatgctaaaagtcgagagcgtgcaacaggcgtggcagcagtggttgaataagctgccgccgaatcgccgcgatgacgacgacgtacaggagatccgctggatgatcgaagagctgcgcgtcagcttctttgctcagcagttgggtaccccgtatccgatctcggacaaacgcgtgttgcaggcgatggagcaaattacgccgtagcctggctggttgtccccggaggcgctgcgcttaccggggctactcgcttaagcgtttacccacgccagagtaaagccgtcccagcctttagtgcccacggtctgcagcgccgttgccgtcaaccgtggctcggcgcccatcatctcaatgaattgacgcacgccctgaacgcgctcgtcggcgctctgtgggttgaccacttcaccgtcgcgtaccacgttatcgccaataattaaggttcctgggcgggaataacgtagcgcccagctcagatagtggggattattcggcttatcggcatcgatgaagatcaggtcgaaagcgggacattcgccaagcgcctccagagaatgtagcgccggcccctctcgcagcgtgacccgctggtcaacgcccgccagctgcagattctcccgcgccacctgggcatgatgcgcgtcggcctccagcgtgagtagttggccgtcggcaggaagctcgcgcgccatccagatggtgctatagccgccgagagtaccgatctccagtatccgcttagcctgggtaagtcttaccagcagggcgagaaactgcccctgattggcggcgacatcgtgtgccggcagcccggctcgatggttgttttccagtacccgatcgagcacaggatcgccggggattaaggcctcaatcaaataattgtctactgccgaccactgttgttgcatattacgcttccccatttagctccctgatgagtcagaccagccgcctcccagcgcccggtacaaatcaatctgcgccagcagcaggttatttttcacctgcaccacgctcaactgagtggagaataacgtacgttgcgcatccaacacgtccagataggaagaatagccgttacgatagcggttctgcgcgatacgcaacgtttctgcggcgaccgattcctgctcctggagctcgcttaactgttcgccgtagcggctgatggcatccaggctatcgttcacctctttgaacgcgccgcgtacggttttctcatatccgtataacgcctgatttcgctgggccatcgagacatcaacctgcgcatttagcgcctggcggttgagtaacggcgccagaatactgccgccaaggctccataaccgcagcgggttgtcgagcagatccggcagcgttctgtcctgcaggctgccggtggcggtcaggttgatggaaggcagcaactgcgcctgcgacgacgcgagggtggcatcagcggccaccagttggcgttgagcttgcacaatgtccggacggcggctcattagcgtcgagggtaactgtgagggcaggcgtagcgggctaagttgtgcgaactcgttacgttttagcgcaccgggattgtcgcccaagagaacgctcagggcgttctcttgttgcgcgatttgatgctgcaatggcgggatctgcgcccgcgtcgagcgcagttcggaatccgcctgcatgagctccaggcgcgaggtatagccggtttcatactgccgtttagccagattccacgcatcttctcgcgatttcagcgtttggcgggtgactcgcaactgctcgtctaatgacaacaaggtgacgtagccgacggcgaccgatgtcgccacggtcagattagcggcagcggcagcggctttctgcgcttcaaggctggcttcggctgcgctggcggcgctgcggttggccccccaaatatcgacgtcatagctggcggtcaggccccctttgtacagcgtgctgtggatgggcagaccggtcgcggcggactgtgcgcgagcgcgggtaccggtcaggctggcatcaagcgaggggaataagctgctatcagcagcgtacgcgcgcgcctgatactcgttaacccgctcgcgggcgatcaggacgtcgctgttgtagcgcaacgcccgatcgacatactgattaagcgcgctatcgtgaaaattgcgccaccacacgccttccaccgggctggagggacccacatcggcacgccaggcggcggggatcgccagcgtaggctccgcacgtgggacatcggcagactgacaaccgaccagcgccagcgccacggcaagggttaacgggcggatcattgtttattctccgcgcgggtatcaatcgtcacctgcaccgacatccccggacgcagacgatagctgtttttctgtccctcatcgaccgcgatacggacagggatccgctgggcgattttgacaaagttgccggtcgcgttatccggcgagatcgcgctgaattcgacgccggtcgctggcgaaatactttgtactttgccgtggaaggtttcgctgttcaacgcatcgaccgagaaggtgaccggctggccgacgcgcacctcggcgagctgtgtctctttcaggttggcgataacccagtgctgaggcggtaccagcgaggtcaaatgcgtaccggcgctgacataggcgccgaggcgtacggagatctgccccagttgcccggccgtcggggcgataatccgcgtattctgcaggtcgatttcggcaagctccaacgccgctttggcgctggccacatcggcctccagcgaatcgcgattgacgatagtggactgcagatcctggcgcgacatctccagtgtggctttcgcctgttcgatatcggctgcgccttgagccgcgctggcccgcgcagagtcgcgttcgcgaatggataacgaaccgtccgcggtgagttcctgtacgcgttttaaatcggcttggcttttctgattctgcgcgcgggcgttttgcaaggcggcctcgtttttgacgatggtcgcttcggcgcttttccgctgctgctggttgtttttcagcgccgcctgtttcatcgccaacgttgcctgcgcctggtgcacccgctgtttatagatgcgatcgtcaatctggaacagcacctgtcccggctgaacggtatcgaaatctttgacgttcaccgcggtgatatacccgttaacctgcgggctgataaacgtcgtctgaccacgcacgtaagcgttatcggtaaactgactatgccgagtgaaagggggcaactgccaggcgtaaagaataaccaatacgccgacgatgccgatcgccgcggcggtaaaaatagacaccacgcggatgttgtttcgggtattggcctgttgcctggccgcgtcctgctgactcataaccactccagagtaaaaattatcttattatttgttgccggttgcgcgttttaacgcgatacgggcggtgattcgcaatctgattaagcgccagaaaatccacaccagcgttgcggcagagatcgccgccgtcaggagataagtgtcattgtaggcgagaatattggcctgtagcgtcgaggcgttttgcagcagcgtggtagcctgcacgttcaatagcgtgctgtcgccaatctggctttgatacatctggctgtactgctgcagtcgctcggcgatcaacgggttcagcgtggttatctgatcggccaactggctggaatgaaatttttcgcgccaggtctgaaaagtaccgaggatagctgagccgagcaggccgccgatattttggctcatgccaaacagaaccgagaagctgaccagattccgctggtcggcaatcaccccgccaattcccgccagcatggccggcgcgaggaagaaggcactgccgaagccaagtaaaaactggctgaacatcaactgttccggacgggtcagggcagtggactggctatcaagcaatgacgcaatcataatcaacgccagcgcggtcgcggtgggccagtagaggcgctgcgggttaagcgtcaggcaactggcgacgataccgcagacgataccggcgaaaatcgaccatgccaggttggtcatctgctcgttttgcaagccgacgtactgcagccaaccgatgaccccggtattctgttccgccagcacgatgcgaatcagcaacataatcagtcccagacgaaggatactgccgctggaaagccatttggtgttaagcagcgggttagtgcgattatgctcgaaggcgatagccgaaacgatcagcaccaccgctcccgccagcgaccagccaagccacggcgcctcaaaccaccagtccagacggcccagcgacaggaccgcgcagactaaagccataccgggcgccagcaggaagaaggtaataaagtccttcttctcaaacacctttttgcggtcgcttggcggcagtttcagcgcgatgacgcaggccagcgacaccagcgccaggccgagctcaaagaagtagagcccgcgccattcgtcaatctgcagcagttcggtcgagaacagacgcgccagcgggatcgccagcgacgatccggtgataccgatggtcaacgccttcaggcggtggcgcgccggccaggcctgcacctgatagtaaattcccagtgaactcaacgccgctgccaccatgccgtgcgccgcgcgcaccatcattgccgagctgaggtcgttgacgaacaggtggaagaaagtgaccagtacatacagtaccaggaagccttcggtaaaggcgcgcaggccgaactgttggcgaaatttcaccagcagcaggttgatggaaacgttagtcataacgtagaccgccggcagccatgcgatttccgtcgaccaggcggcaaaagtgccctgcagcagctgcaggttggcggtaacgacggcgttacccagcgcgccggtcaggcacaccagcagcccgacgatgccgtaagcgacgcgttttggcgtactgtgaatcggcgtcgacggcgagccgagcatcgccggtttttcatgcggcgcccagtcgtggggcacataaggattagcttcgcgacgaggcattatttcttttccacctcgtgcagcagcttttccagtacccggtgggtttgctcacgctcttccggagtaatggcggtgaggatctcctcgcgcaggtcgtcggcgaccgctttcacctgatgaaagagcgccatccctttggcggtggcaaccaacagacgcttacgtttatcgctgtcaggcttaacgcgctccaccagttcaagttcgaccaggcggttaatgagcgggacgatggtggcgctttcgacacccagttcctgcgccagttcgctttgcgagaggggctgctcgttgcgggcaatggctgacaccgccacccatgacgcctggctcatgcctagattttttaaccgccggttaaccgccagccgccagtgatgcgcggttaagtataagagatgggaaaagttaagctgtcggttatccatgttccgcctgcaaaatcattagagctctaatgattttaggcgcggcgatttactgatttcaagtcacgaagataaaaataggttaacgcaatgtgcgttttttgtgggaaaggcaggctggcacgtggagaaaaaaataaaaaacccgggcgagcccgggtttcgtatctggattacctggacattagcccggatagatgccgcgatctttacgcgccagcagaatgcgctcgcaggcgacgatgtaggccgcggtacgcagagaacacgctttctcggcggctttatcgcagacgtgaacaatagcatccgtcatgatgcggtccatcttggcgttgatctcttcttcgctccagaagaagcttgccatgtcctgcacccattcgaagtagctgacggtcacgccgccggcgttacagataacgtccggaaccacgatcaccccgcggtcggccagcacgtcgtcggcgtccggataggtcgggccgttggcgccttcgaggatcagcttacagctgattttttccgcgcgttcacgggtgatttggccttccagcgccgccgggatcaggatatccatctcggtggtccagaaatcttctttggcgatttcacgcgcgcccgggaaaccagcaatcttcttgttctcggcctgccatgcggtcagcgcctgcatgtcgatgccgccttcgttgaacagggtcgcggtatggtcctggatcacgacaatgcgcgcgccaacgtctgcaaacagacgagcggcttcgctgccgacgttaccaaaaccttgcagcgccactttcgcgccttcgatttcgataccgttgcgacgagccacttcacgaccggtgacgaagacgccgcggccggtggctttttcacggcccagcgaaccgccgagatgaatcggcttaccggtaaccacgccggtgatagtggtgccgtgattcatggagtaggtgtccatcatccacgccatcactttaccgttggtgccaacgtccggcgccgggatatctttctgtggcccaatgataatgccgatttcgctggtatagcgacgagtcagacgttccagctcgccttcagacagtgagaacgggtcgacgcggatgccgcctttggctccgccgtaaggaatattgaccgcggcgcacttaatggtcatccaggcagaaagcgccattacctcgttaagatcgacatccggatggtagcgaacaccacctttacccggtccacgcgatagattgtgctgtacgcgatagccttcgaaatggcggatggtgccatcatccatctgcactggaatatcaacgatcagcgcgcgtttcgggtgacgcagagtttccacccagtaggcgaggtcgcccagatacggcgcgacgcggtcgatctggcgcaggtaagtggtccatggagatgtactactttcagatgcgtaagataacttttccataagagtcctgtatctcaatgttatttgtgtcgtgtaaaaccgtggaataggtacagcagtaaaatctgtgtgatgaatgttatcaccaattttataaaccagtatttgacggctattccgaattttacatttttgttagttttttggggttgcatttgaataaataagcacgaccaggtgcctgtatgtcatgcatggatatgcatattttatgcagataagtgaatatagaaataattttttcatatttttcattatcttgatgatcctctaaaagtgaataaaatgattcatggttgtattgactttgttgctcgtcagggcccagcattagctcacgcaatacacaatgtattaaccgtgaattaacatatatccatacaaataaaatggcttatttcagttgtggtgaaaatatttgtcatcgcagcgggacgtgtgcgccctgaaaacggctaaagggaaattgttaaattcgactattcacgattggccaatttatgccgccgatcctcgttccggagaattgttatgtcaggcagtatcactcgcgaagattttgatgcttatatggttccgtgtttcgctcccgcgccgtttatcccggtgaaagcggcgggctcccgtgtctgggaccagcagggtaaagagtacattgacgtggctggcggcattgcggttaacgcgctgggtcatgcgaatccggcgctggctaacgcgctgaaagcgcagctggataagctgtggcacatcggcaacggctataccaacgaaccggtactgcagctggcgaaaaccctggtggagtcgaccttcgccgataaaattttcttctgtaactccggtgctgaagccaacgaagccgcgctgaagctggcgcgcaagtatgctcacgacaaattcggcgccgacaagagcgaaattatcgccttcaaaaactctttccatggccgcactctgtttaccgtaaccgtaggggggcagccgaaatactccagcgactatgcgccattaccgcaggacatcacccatctgccgtataacgatatcgacgcggtgaaagcggcgttctcttcccgcacctgcgcggtcatcgtcgagccgattatcggcgaaggcggcgtcatgccagcggatccgcaattcctgcaggcactgcgcgagctgtgtgatgagcatgaagcgacgctgatttttgatgaagtgcagaccggcgccgggcgtaccggccaactgtatgcttaccagcactacaacgtggttccggacattctcaccagcgcgaaagggctgggcggcggcttcccaattggcgcgatgctggcgaaagaggcctgggcgcaggtgttccagccgggtacccacggcacgactttcggcggcaacccgctggcggcgaccgtcgccaatagcgtgctggcgcaaatagatagtgcgctgctggcgggcgtgggcgaacgccatacccttatcgtcgataaactcaatgcgctgaacgccaaatatgatctctttagcgccgtgcgtgggatggggctgctgattggcgccgaactggcaagccatctgcgcggcaaagccaaagcgctgaccaatctggcggcggaagagggactgatcgcgctgatagccgggccggacgtactgcgtttcgccccggcgctcaatattcccctggcggatattgatgaagccttcgtgcgccttgagcgcgccgtcgcccgcttaaccagctaatccgggagacggcctatgatgttatttcgtcccgtacgggaaaacgacctcgatgatattgtccgcctggcctcccgggcgggcgtgggaatgacctcgctgcccaatgatgccgtgcgcctcgccgcacggatcaaacgcagcgtggagacctttgccggcaagctgacgcgcggcgaacaggggtttctgtttgttctggaagataccgaactgagccgggttgtcggcgtcagcgccattgaggtcgcggtggggctcgacgaaccgttctacaattttcgtattcagaaaacggtacgggcatccaaagagcttggggtttacaagcatcaggatttgctcaatttaagctacgaccataccggccacagcgaactctgtaccctgtttctggaccctgagtaccagaagaaccgcaatggcctgctgctttccaaagcgcggtttgtctttattgccgcgttccgcgagtggttttcaccgcatctgttcgccgagctgcgcgggcgcagcgacgagcagggtaattcgccgttctgggatgcgttggggcaccactttttcgatattcctttcgccgatgccgaccgcctcaccggtacagggatgaaaacctttatcgccgaattgatgccggcttacccgatttacatctcgctgctgccggatgatgcccgcgaggtgataggccaggttcatgctaataccgcgccggcgcgggctattctcgaaaaagaggggtttggctggcgcgggtccgtcgacatcttcgatgccggcccggtactggaagcagaaaccgataatattcgcgccatcagagagagctactcgctgccggcgctgcaactcatgacgccgcaggcgacgccaaccatcgtcgccaacggacagtttgataatttccgcgcggtgctcatcgcgcaagagacgccgggagcgctcgatcagcaggcgctggacgccctgcaggtcaatgccaccgaccgggttcacgcggtgacactcaatccagaggaaaacagatcatggcggtaaacgcacagtttatagcaggtaagtggcagcagggcgcaggcgcgccgttaaccaagctggcgccggaagaccagtctattttatggcaggcgagcagcgccggcgcggccgatgtgcaggccgcctgtactgccgcgcgcgaggcgttttatagctggtcgcatcgcccattaagcgaacgcattgccgtggttcagcgtttcgctgcactgctggaagagaataaagaggcgctggcgacgttaatttcccgtgaaaccagcaagccgctgtgggaaacgcgtactgaagtacaggcgatgatcggcaaggccgggatttccattgatgcctacgccgaacgtaccggttatcgcgagtccgctatgccggacggcaaagcgctgctgcgccataagccgcacggcgtgatggcggtgtttggcccttacaacttcccggggcatctgccgaatggccatattatcccggcgctgatcgccggtaacaccgtggtatttaaaccgagcgaattgacgcccgcgaccgcggaactcaccgttcagctatggcagcaggccgggatcccggatggggtgctaaacctggtgcagggggcgaaagataccggccaggcgctgctggaaaaccgcgatatcgacggggtgctgtttaccgggagtgccgccgctggcttccatttccaccgctacctcggcggccagccggagaaaatgttggcgctggagatgggcggcaataactcgctgatcgtggccgacgttgtcgatagcgttgcggcgctgaacgtgattattcaatcggcctttatctccgccgggcagcgctgcacctgcgcgcgtcgtttactggtaccgcgcggcgaacagggcgatgcgctacttgaacaactgattgctgccagccggcagatccgcgccggtaaatgggacgccgatccgcagccgtttatgggcggggtgatttcgcaaaccgccgcgcagggcatgctggcggcgcaggcgaagctggaagcgctgggcggcaatgttctgctgcgcatgagccagcctgatccgcgctcaaccgtgctgacgccgggaattatcgatgttaccgggatcgcggtaccggatgaagagtacttcggcccgctgctgaccgtgattcgttatgaccagttcgatgaggcgatcgcgatcgccaataacacccgctacggcctggcggtggggctgatttccgccgacccggcgctgttcgacaagctggccgacgaagcgcgcgccgggattgttaactggaacaaaccgctcaccggagcctccagcaaagcgccattcggcggtgtcggcgcctccggcaaccatcgcgcttcggcgtggtatgccgccgattattgcgcctggccgatggcttctctggtcagcgaaacgctgacgctgccggcgacgacgtcgccaggtctgccattctgataaccgtttttgtgaggacactatgtctggatttgaagcgaattttgacggcctggtggggccaacgcaccactacgccgggttgtcggtaggcaacgaagcgtcacaaaacaaccgcgacggtttatctaacccgaagaaggcggcgctgcaggggctttataagatgaagaccctggccgatcgtggctttgttcagggcattctgccgccgcagccgcggccaaatatgacgatgctgcgcagtattggttttcagggtagcgacgagcaggttatccagcgtgcggctaaagaggccccgcagctattgtcggcctttagctccgcttcctcgatgtggaccgccaacgccgccaccgtgtcgccgtcggccgatagcgctgatggaaaagtgcattttacggtggcgaacctcaacaataagctgcaccgcatgcaggaagcgccgatcacctcggccatcctcagggccaccttcgccgatgagcgctactttgcgcatcacgcggcgctaccgcagcatggcgatttaggtgatgaaggggccgctaaccataaccgtttctgcggggattatgaccgccagggcgtgcagttttttgtctacggtaagcgcgccagcggcggtgttacgccagcaaaataccccgcacgccagacgctggaggccagcgaaggggtggcgcgtctgcatcagctcgacccgcagtacaccgtattcgctcagcaaaatccgcaggctatcgaccatggcgtattccacaatgatgttatcgccgtcagcaaccgccacgtgctgtttcatcatcagcacgccttcctgcagcagcgggaggtgctggcaacgctgaaggagagcaacgccaggctgaatattccattcaccagcgttgaagtgccggacgagcaggttagcctcgatgatgcggtggcctcttatctgttcaacagccagttactgagcaaaaccgatggcaaaatgctgatcgtggtgccggaagagtgccgtcagcgtgaaaacgtctggcgttatctctccgctcttgccgccgatagcgcatcgcctatcgatgaagtggcggcattcgatctacgtgaaagcatgcgcaacggcggcggcccggcctgtttacgtctgcgggtggtgcttaacgatgctgagcgtgcggcggtcaacgctcacagcctgatgaatgacgaacgctaccagcaactgacagcgtgggttgaaaagcattatcgcgatcgcctgcatgccagcgatctcgccgacccgcagctgctgcgcgaagtttatcaggcgctggatgagctgacgcagattttacatctgggcgcgatttatgacttccagcgataaggggccgggaatggaacaaaacgtcaacgatttactgcattgtaaactgcagacatggacctttccgccgactatcgaagccagttggttaggcgatggcattctgcaactgctgccaaaaacgtcatggcgacaggcgacggtgctttctgccggggtgcacggtaacgaaaccgcgccgattgaaatgttgctgcagatcctgcagggattaagcctgggcgagcagccgctgacccacgcgctgctggtggtgttcggcaatctgcccgccattcgcgccggccgtcgctatctgcataacgatctcaaccggttgtttggcggccgccatctggcggcgatgccgggtaacgagtcgcgtcgcgcttttgaactggagatggccgtacaggccttcttccgtagcgccgatgcccacggtaaggtgccgcgcacgcatctcgatctgcataccgccattcgcgggtcaaaatatcggcagttcgcgctgctgcccgctcatgatggcgactacagcgcggatttttatcagctgttgcaggccagcggtatggacgccatcgtgcgccataccgaaccgggcggcacctttacccacttcaccagcgagaagttcggcgcgcaaagcgccacgctggaactggggaaagtgatgccattcggtgaaaatgatttgcgcttgtttgccgccaccgaactggcgatcggcgcgctgatcgccgacggcatcatgccgccgcggagcaaagcgccggtcgaatactttgtggtgcagcagagcatcatcaagagcgagaacggttttacccttaatctcgacccgaaaattgaaaactttaccgcgctgccggcaggctatgaaatcgcccgtcaggcacagaaaacctgggtggtcaatgccgacgccccctacatcctgtttccgaatgcgggcgtcgccgccggtcaacgcgccgggctgttgctgaccgctaccgcgccaagcctttccatgcctgcttgaaggaatcaacatgactgaacatcaacgtgaggggcaggttcatcctgccaccgacggggagtgcccgtcgcagctcaaacgcggccttggcgcccggcacattcagatgattgcgctgggcggcgctatcggcaccggactgtttatgggggcgggcagaaacatcgccgtcgccggaacatccattctgcttatctatctactggtaggtttctttacctatatggtgatgcgggcgatgggggagctgttgctgacccgcctggattaccgttcgtttgcggatttcgtcggcgactatcttggcccgcaggccagtttctatctgggctggacctactggcttagctgggtggtgacctgtatcgccgacgtggtggtatgcggcagctatatgcagtactggtttccggagatgtcggcgtggatgcccgcgttgagtacgcttgggattctgttcttgtttaatttgttgtcggtaaaaatgttcggcgaggccgaattctggtttgcgctgattaaggtcatcaccattattgcgctgattttaaccggcgcgtggatgattgctatcggctggacttcgccggacggcgtgaaggcttcgttaggccatctcaccgacccgacggcctttatgccgcacggggtgaccggtttcttcgccggtttccagatagcgatcttctccttcaccggtattgagctgctcggcaccatgacggcggaaacgcgcgatcctgagcgcatcctgccgaaggcgattaacgcgctgccgctgcgcatcattattttctatctgctgtcgatggtggtgattattgccgtggcttcatggccgggcgtctcgccggatgccagtccgttcgtgaccctgttcgccaaggccgggctacctgccgccgccgcggtgataaactttgtcgccttgacgtcggcaatgtcgtcggcgaacagcggcgtttattccagtacccgcatgctgtacggcctgtcggtggaaaaacatgcgcactggcagttccgtatactatcgcgtaatacccgcattccggtacgtagcctgctgttctcctgcttctgcatgctaagcggtacgttactgctgttcctggtgccaaacgtgatgacgttgttcaccatcgtttcaacgctggcggcgatcatggtggttttcagctggggtatgatcctcgtggcgtacctggtgtatcgccataaacgcccggacctgcacgcgcggtcgaaattcaaaatgccggcgggagtggtgatgtgctggctgagcctgctatttttcgccttctcaatcttcattatgattttcgacccggatacgctgctggcgctgatggcctcgccgctgtggtttgttgcgctatggtgcttctggaaagtgaaacagaagcgcgaagggcaactggcattggataacgccagcgcctgatgatacccggcagctgaagcgtggctgccggattttccttttcgccgtagcgcggtttatgatgtcgcccgacacttcattgttggatcaggacagaagaaggaaagggtatgacagagcatttcccggcgctttcacacgacacgttagcggcggccaatctcatcggcgactggttggcgcaggatgatttgccgcagaatgcgcagccgcagattgcggtgttggccggtaacgcggtgatcccgaccattgacgccgcctgtcggctcgcggctcagaggcagattccactattgataagcggcggtattggtcattcgacgacctttctttacgacgccgtacaaaagcatccgcactatcaggcgctgcaggtagaggggcgtccggaatcgcatatcctggcggacatcgccgaacaattctggcaaattccgcgcgatcgcattgtggtggaagaccgttcaaccaactgcggcgaaaacgcgtggtttacccgccggttactggaagagcgtgggctggatcattcctctggcgtggtgattcaggatccgacgatgcagcgtcggacgatggcgacctttgcccgcgtctggcaggaggcaccggcgcagccgcagtggtggagctatcccggttgttcgccgcggcttgaaaacagcgctgctggcctgagattcagcggagacgatagtggattgtggccggtggggcgttatctggcgctgctgcttggcgagctgccgcgtctgctggataacgcgcagggttatggccccaacggtaaagggtttattacccacgtcgatttcccacacgatgttagcgcggcgtggcaatgcttgcgtgaagatacgctattgagcgaggcgctgaacgccagaacgctggggtagggagaaaggcggatagccgcagctatccgctggttctgagtttacttcgcgaatttatccagtacgcggacaagctgggtaacaaagccgtactcgttatcgtaccaggccacggttttcacgagctgtacgccgccggcttccatgatctccagttgagtcgcatcatagattgagccgaaatggctgccaataatgtcggaggagacaatttcctcttcggtgtagccaaaagattcattgttcgccgccgcatttttcatggcctgattaacctcttcagcggtgactttcttcgccaatacggaaaccagttccgtcactgagccggttttagtcggcacgcgctgggcgtgacctttcagtttcccgctgagttccggaatcaccagaccaatggcttttgccgcgccggtggtgtgcggaataatgttttccgccgccgctcgcgaggcgcgcaggtctttgccacgcggcccgtccaccagcgattgcgtaccggtataagcgtgaatagtggtcatggtgcccacggtaatgccgaaagcatcgttgagcactttagccattggcgccagacagttggtggtgcaggatgcaaccgaaatgatggtatcatccgggctcatggtgtcgtcgttaacgtgataaacgatggttttcatctcgccggcaggggcggaaatcagcactttcttcgcgccggcggtcaggtgcgcctgcgatttttccgccgacgtatagaaaccggtacattcaacaatcacctcagcgcctgcggctttccacggaatatgctgagcctctttttccgcataaacggtgatttttttaccattaacgatcagcgcatcttctgtaaaatcaacgctccatgggaaaggaccgtagttagagtcatgtttaagcaggtaggctaagactttcggtgaggtgagatcgttgatggccacgacctccagcgggctatttacttctaacaggcggcgaagtactaaacgtcctatacgaccaaatccattaatcccaagtttgctcatggatattctcctggtggtgaagttgatacgttaaaacttcttcaggcagagcggggagagtaaactatttactttcagcggcttagcagttcacctgcggtgtttctattgctaagttacctgcctgaagcgtcttcagtaactgtcacgtggagccagatggtgcgaaggaagtataacgccgggtcggaggtggttccaatgttcttaccgcgacagcacaacaaaaagagtgcctaccattgttcgctatttcatgcggtgttgagtggtaaatatgatctacatcacaataacagaaattagaaaaagcgcagaaggatatagctacatcgaggttgtattgataactatagcggtggttcagcacaatatcgataatgagaatgaatatcattcattgacatctggtcatattaatgtaaccttgcattaggaataatacagggatgaatagaaaatggattgcggcctgaggaataattatcaacccatagcttaaaaatttaaaaatcatgccgaaattccatcctgctggcatgaaatgcggggaggaaaatctgcagggtaaatcataatgcgggtgtttaaagatattatccttgccgggagcattctcttttctgtcttatattctgttttctcgttgtgcgatgttttgttgattatgcagatattttattggcacccagagcactactgtctgtgtttgccattggatgtgtatattttctgagcaatgcttatttttggctattgaattacataaggaatatgaaagatgaaagagctaacaaataaacagttgggtatggtctccggtgcagggggggatattgggcgggaaattgctcagggaatcggcgctggagctggcacatttgtaggcggaactcctggtgctataaccggtgggatcgcagggggacaggtttatgactgggctgcaacaaaaacaccggacccagcgatgtccccatctggtctgggcggaacgctcaaacaaaaacccgctaaccttccatccgaagcgtggaatgcagcagcaggcagagaatgctactggaatccgaataacctcaatgatatttgttactgacagatgcagattggggtacgggtataaaccagtctaaaagccaataaggatagctgttagcgtatggaagagcatattatcagctcttccatctcttaacctttaaaactagccataattaaagtttgtcagtcgagtgggagtcgtccacgccttttggcgccgatggaataaaaaatgaacgttgacggatataaccgcgagtacaatattgcaagaaacaaagccgtaaccggctgttttgccatgtttgcgctattttttagcatcacatgtttgccgctttttttcgagggcagcaaagaccttatgataacgggatatctctatccactacttttcggactagagttcctggcaattgcccccctttattatctctatttctacaaacgcgagggtatggggagaggaaattttcatttcggcatttttattatacttttcctgtgtattctgttgatccaatttctgttgccttttgtcactgcaggctatcagactgaaaactggtcagcttcacagatgcgactggatgcgcatgtattctggctaaatgccattgtgatgattctattggttcctgtttatgaagagatggtcttccgcggctgtcttttcagtgtgtttaaatactggctcgggaataacaattatgcggcggctgtcgctgtgtctgttgtattttcagcctgtcatttacagtacatagactggcgatcgttcctgatattatttctggtttcgctgatgctggttatcgggagaataaaaaccggcggaatactgatgccaattattcttcatgcgctgatgaacgcggtcgtaattggtattcagtatgtgtcattcctccagtattccggagaggcttagctatagcgggaatgaaatatgtttcgtaaggaagcgctcgaaaacagggataaaacatggtgtggcaaagcagtattactaccgggaatctcctctcggctggttataattaccagcgcgctttttttcgtctgcttcattgttttaattagcaccggcacttatacacgacgtattagcgtgcaaggtgaagttaccacctggccgagaccggttaatgtctattccggtgtccagggatttgtcgcgacacagttcgtccgggaaggggaccctgtaaaaaagggtgatcctgtttatcaaattgatgtcagtaaaagtacacgtagaggcgtggtcaatgagactcaacgacaggatatcgaaaaccaattgaagcgcatcgccgagattatcgctcgccttagagagagtaaggaaaccactttgcggatgcttgagcaacagaaaatacagtatagcgcctcttttgaacgctcggcaggcattgtcaggcgtgctgaggagggaataaaattaatgaaaaataatatggataattaccgacggtaccagcagcaggggttgattaataaggaccagttaaccagtctggtggccttgtactaccagcagcataatagtttgctcagcctgagcgcgcagcatgaacaaaatgctctacagttaaccaatctggaaagtcaaattcagacgcaggcggcggaatttgacaatcgggtttatcagatggaactgcagcgttatgagctacagaaagagcggattaatactgatgcgggaggcgatattatcattcgtgcctcatcagacggcaaaattgattcattaagcgtcaccccaggtcagatggtcagcgaaggcgacagtctgctgcagataattccagaaaaaatacaacgctattatttggttctttgggtacccaatgaagccgttccatatatttcagtcggtgatagggtgaatatccgctacgaagcctttccggctgaaaagtttggtcagttctcggcgaaagtcacactcatttcccggacgccagcttcctaccgtgaaatgcagacctatacgaccgccccgattaactctacggcaggtgcggctgcttactacaaagttgtgattagtccagaaaagcaggctgtcagctacgccggcaagcgtctgcctctggaaaatggcatgaaggcacagagcacgttatttctggaaaaacgtaaaatctatcagtggatgctctcgccattctacgatatgaagcgcagcgttacggggccgattcatgaaccgtaaccacttcatatcatccatcgaggagaaattggatctgaaatttcggcggcgagtcccggtcgttcatcagacagaaacgtcagaatgtggactggcctgtctggcgatgatatgcggacattatggtcgtaatatcgacatgatcgccctacgtcgccaaataaatctgtctgcccgtggagcctcgcttgccagtgttcagcaaaccgggattgagttagggatggaaagccgggcattgtcactggatctccatgaacttaatgctctcagaatgccctgtatcctgcactggaattttaatcatttcgtggtgctcgttagcgtacgtaagaatcggttcgtgcttcatgaccctgcgagggggcgaagaactgtcgggagtgatgaaatgtcacagtgcttcaccggcgtggcgctggaggtctggcccggcagtacatttgtgcaggaaacgatgaagagccgaatcggaattcgggcgttaatcagcagcgtgcagggtatccggggcgtactgagcaaaattttctgtctgtcgctgattattgaagctatcggcctggtgatgcctgtcggtacgcaattggtgatggatcatgctattcctgcgaatgaccggggactgctcatgcttatctgtggagtcctgatgttttttattttggggcgtactttggttagcgtgatccgcgcatggtcatcccttgcgatggagtcattgataaatgtgcaatggcagtcggggctattccgtcatctgcttcagttgccgttgacctattttgagcgacgaaagatgggcgatattcactcccgcttcagctcgttggatgcgcttcgcgccacgtttacaacctgtgtggtgggggcaatgatggacagcatcatggttgccggtctcttgttgatgcttatcctgtacggtggaaaattgacggtttttgtactgggctttacagcggtatatgtcttcattcgtatattgacctatagccggtaccgccagctgtcggaagaagcgttaatcgccggagcccgtgctggttcatattttatggaaacactctacggaatagctacggttaaaatgcagggaatggcagaacggcgtgggagccactggctgaacctgaagattgatgccatcaataccggtatcagactcagccgacttgatatgttcttcggcggcattaacacgtttgtggcgacgtgcgatcaggtgactattctgtggctgggcatcagtctggttatggagaaccaaatgactatcggcatgtttgtggcatttggcgcattccgcgcgcagttttctgaccgggtaggatcgctggtcaacttcttattacagctgcgtatgatgagcctgcacaacgaaaggatttcggatatcgctttgaatgaaaaggaagaaagaaaaccggatttaggattaaaggcaaccatgtctccggctagtctggagattaaagcgctaagcttccgttacgacagccagtcagcacccgtctttagcggccttagtttcaggatccgagccggcgagagtgtggccattaccgggccctcaggttcggggaaaaccacgctgctcaaagtactgtgcggcttgtctgaaccgatatcagggactgtcttaatgaatggtacggatatcaggcaactggggataaataactatcatcgcttgattgcctgcgtaatgcaggatgaccggctgttttctggctcaattcgggagaatatctgcggattcactgaaaatattgatgatgcctggatgagagaatgtgcccggacaagccgtattcatgacgtgatattggctctgccaatggggtatgagacgttaatcggagaactgggggaggggctatctgggggtcagaaacagaggatttttattgcccgggcgctttatcgccgtccggatatattattcatggatgaagccaccagcgcactggacgcagagtgtgaaaaagacgtcagtctggcaatgaaaaagttgaatataacccgaataattattgctcaccgtgaaacgaccctgcaaaccgcggacaggatcatcaccctcggcgaatccaattaacagccaatatcctaatccactgcggccatttggtttgcgatgcggttgaataatgaacacaaagcggaatggcaggagtggcagggcctgcagtgagttatccacaaactatgcgatctgataccgactcgttttgtggataacctcaaatctttcgggatacttaattcactctgcgttataagtttgcgctatacatcacgataatcaatgtcttcactcggtacccttaatataagaatacttaaacaaggggaatagcataccaatgaaaaagagcattgcactgacgatggtggcgctggcctgcctggcggctaacgtccaggcagcagagaaacttgctggtaatgaaatacttgccgtacagaaaggcggggtgccggataaagtctatacccaacatcagccgaaattacgtatagcaacctataatatcggcaagaatgaagcgtctgataatgtggccgattttacggcacttaattcagcgattaaaaaaattaacgccgatattattgccgtcccggaagtcgatcacaaaactcagcgcagccagaaaatcgatcagcttaagacgattgccgatgctaacaatatgcattatgcctttggtaaagcgttagatttcgacggtggcgaatacggactggggctgctgtcaaaatataaaatcctgcattctcaggtggtgaagctgccgtcaggcaatgcggaacagcgcgtggcgctactggcgcaggttgatgtaccgggttttgattccgcgccgattattatggtgacccatctcgactggcaaaaagatcccaccatgcgtaccgaacaggctcgctatcttcttgatttgagtattggcgatgcggcgtctgattttaaagatatcgcctcttcaattaagatcctggccggcgatttcaattcaacccgtgaagaacagccggtgaaagagatcggttatttctttaacgaagtgtcgaagcaggggacggatacgcgtagctggcctgccgttaacccggccattgatatcgaccacattttcaccttcaaaggacaaaagtgggatgtgaagaagctggagatcccgcataactcgccggaatttaactggtcagcggccagtgaccatctgccggtcattgctgaactgcaactcaccgagcagtaacattgcccagggctctttgcaaaagagccctgatgctattcaattcgcgctaacgcagttttttaagcctcggtaaaggttaatgaaaatttaagggaaggcggttatgttaacaacatcacacttccattaaggtttgttcatgcgcgataaatattctggcctgcagataggaatacactggctggtctttttactggttgtcgtcgcctacgcggcgatggaactgcgcggcttctttccgcgcagcgaccgtccggtgataaacatgatccacgtctcctgcggtatttccatttttgtcctgatgatcgcacgcctgctggtgcgcctgaagtctccggcgccgccgattgttcctaaaccctcgccgatgatgaccggtttcgcccatcttggccatctggtgatctatctgttgtttatcgcgctaccggcgattggcatggtaatgatgtattaccgcggtaacccgtggtttgctttcggcctgacgatgccctttgcggcgcaaagcaacttcgctttggtcgacagccttaaggggctgcacggcttacttgccaatatcggctatttcgtgattggcctgcacgcgctggcggcgctgctgcatcactatttatggaaagataatacgctgctgcgcatgatgccgcgcaagcgctgagtatcacgcccggcactcctgaacccgcccaccggcgggttttttgtttccgtaactcgccaataaatgattcgcaaaatgttacttatgctgcaaatttgtatcgaatatgtaaataaaaatgtctaatcgaaacgaaaggttctataagaatctcagtgcggtggattgaatccagccgggaggccgtcgaaacgacacccaggcacgttcagcggtatccgcagcgtcattggctaaaacgcctgctttttcaataccgatgagcaaaaggaaaacctgacatgaccgataatataccggccgcttctccccctgtcgccgatgtggggggcgctgaacgcctgagcccgcgcgagcaggtggtgatcaataaattgttccgccgcttaattccttttctgtttctcctttttatcttttcgtttcttgaccgtatcaatatcggctttgccgggctcaccatgagccaggatttggggctgagtagcactatgttcggcctcgcgacgacgttgttctacgcgatgtacgtcatctttggtattcccagtaacatcatgctggggatcgttggcgcgcgccgctggattgcgagcattatggtggtgtggggaatcgcatcgacagcgaccatgttcgcgactgggccaaacagcctgtatctgctgcgcatgctggtggggattgccgaagccggttttcttccggggcttctgctctacttaacctactggtttccggcctactaccgggcgcgcgccaatgcgctgtttatgattgctatgccggtgacgatggcgttgggctcgctggtctccggctatattctcagtatggatggcatgctgacgcttaaaggctggcagtggttattcctgctggaaggattcccatcggtgttgttgggggcggtagtctggttctatcttgacgacagtccgcaaaaggccaaatggctcaccgatgaggacaaacgttgccttagcgagatgatggagaaggacaaactacggctagtgcaaccgaacggtagcgccagcctgagcgccctgcagcaggggaaaggcagcctctggcgcgacgtcttcaccccggtggtgttgatgtatacgctggcctatttctttctctgtaataccttaagcgcgctcagcgtctggacgcctctaattctcaaaagctttaaccagggcagcagcaatatcgccatcggcttgcttagcgccgtaccgcatatctgtaccattgtggcgatgatttggtggagtaaacgttctgaccgcttacaggaacgtaagctgcacacgttattgccctacctgtttgccgccgcgggctggatgctggcggcgcacggatcaaatagcatcatgcaactgttgggggtgattatggcctcggcgggggcctatgcggcgatggtgattttctggaccacgccggatcaatccatcagcctgcgctcgcgagcgatcggcattgcggtgattaacgcgacgggtaatatgggatcggccatgagtccgctgttattcggctggctgaaggatttaaccggcagctttaacgccggattttacctcgtggccgggttcctggtattgggggcgctggtggtatcgcgcatcccgatgaaggccagccgtccgcgagcgacgccataaaaaagataaaggagtagtgatgagagtgagacgcgcggtacccgatgaagcccctgcgttgtggaatatccgtaatcaggcgattcgccatggctgtcatcaaagctatggcgctgaagtgattcacgcctggacgccggaactgatgcccgaagggtatcgtcacgccgttgccgataatccgttttatatcgtggaaaataggctgggccaacccgtcgctaccggctatctcgatattgagtccttaagcgtggaagcgatctttacgctgccggagtggggcgggcagggatgcgcggatttgatcatgagggcggttattgccgaagctcgccgacgggggctcgaaaccattacgcttgaggcgacccccaatgcggcgggcttttatctacgccatggctttgtttcacatggtgaaaagagtcattattcgaaaatggccaacgcagagctacgctgtatagccatgagcctcactctcgattaacggtaaacctgcgccgctatgctatggttgttagcggcgtttcaatttgccactttagttaaataaatatagtatacccccctatatgatatggagggcatctcgtgccacattcaccagaagacaagaagcgtgcgcttagccgcatacgccgtattcgcgggcaggttgaagcgctggaacgtgcgctggagtccggcgaaccctgcatgactatcctgcaacagattgcctccattcgcggcgccgccaacggtttgatgggcgagctggtggagatgcatctgcaggatgaactggttagcggcgataccaccccggaccaacgcgccgcccgcatggcggaagtcggtcacctgctacgatcctatttaaagtaaaatcacgacgaggaatggacagtatgaaatcacgtgcagcagttgcctttggccccggccagccgttaaaaatcgtggagattgacgtcgcgccgccaaagaaaggcgaagtcctggtcaaaatcacccacaccggtgtttgccacaccgatgcttttactctctctggcgacgacccggaaggcgtgttcccggcggttttgggccatgaaggcggcggtatcgtcgttgaagtcggcgagggcgtgaccagcctgaaacctggcgatcacgttattccgctgtataccgccgagtgcggcgaatgtaaattctgcaagtctggcaaaactaacctctgccaggcggtccgcgccacccaagggaaaggtctgatgccagatggcactacgcgattctcctataacggcgagccgatttatcactatatgggcaccagcaccttcagcgaatacaccgtctgcgccgagatttcgctggcaaaagtaaacccgcaggcgccgctggaaaaagtatgtctgttgggctgtggcgtgaccaccggtatcggcgcggtacataacacagctaaggtgaaagagggcgacagcgtcgcggtgttcgggctgggcggtattggcctggcggtgattcagggagcggtgcaggcgaaggccggacgcattctggcggtcgacactaatccggataaatttaccctcgccagggagatgggggctaccgacttcatcaacccgaacgactacgataaaccgattcaggacgtgattgtcgagctaaccgacggcggcgttgatttcagtttcgaatgtattggtaacgtcaacgtcatgcgcgcggcgctggagtgctgccataaaggttggggtgagagcgttatcatcggcgttgctggcgccggccaggaaattaaaacccgtccgttccagttggtcaccggccgggtatggcgaggttccgccttcggcggcgtgaaagggcgtagccagctgccggggatggttgaagacgcgatggcgggtaagattcgcctcgatccgtttatcacccaccggttaccgctcgatcagatcaacgaagccttcgatctgatgcatgaaggtaaatcgattcgtacggttattcacttcggtgataactaagtattgctgatagcgaaacccgggccatttatcgcccgggttgacttctggccgcgttaatacttgcgccagtgctcatagccggtttgccaacgacgttgctctcgccgttctctttcacgctgaatatcggacttttgatcttcccagactgggcaatccgggccgcttgccacttcgcagggggcggagatatcgtttagcggattgacctttttctcttcccacagctttggatcgcgtaaatccacttctggcgctttcagcgcctgggctgaggtggttgcggctaataagagtgcgccgatcggcaggtgatggagggctcctttcatcttttatccttgttatgttgttattgataaccattcgcaataataacataacgcaatagaacattctaaaattagagcctgccgaaggcacttatagtgctgacgcagggatcacattgagcttgaattcccccggaatagtggaaatcgcctctacggttaaaccgtttttatcggttctgcccttgaatattttgccgtctggcgtggtgatttggtagggcagatacggaataggtttgccagtcaaaggatgtttaattacaaaatcatggcgataaagttgctgaggctggtgatgcgtacaaccttgcagcaacaggagaaaaatcaacgcggcagcgcctttcattaaagacattatggcttcttccctgattatcgagccggaaatataagacgctagtgtaacaaaggcgtgcggatcggcacctaaatggaatctgaaagcggtgaagaaaaaaaggcccctgaacggggccctggttttattttttatcgggtaacgcgtaggcgatgatgtaatcgccgcggtccggagactggcgcgcgccgccggcgttgataatgatgtactgcttaccggttttcggtgaaacgtaggtcatcgggccggattggctgcccaccggcaggcgagatttccaaatctctttgccgttggcggtatcaaaggcgcgcagatagaaatcctgggtgccggcgaagaacagcaggccagactgggtagacagcgaagctcccagcgttggcatgccgatagggatcggcatatgcatgcggatacccagcggaccggtatcttctaccgtacctaccggaacctgccagaccagcttaccgcttttcagatcaaccgccgacatggtgccgaacggcggcttctggcaggggatacccagcggcgacaggaaacgttcgcgcatcgcgccatacggcgtaccttccatcggcacgatacccatttcgataccgctggcatctttagccactttcgctcgcggtaccatgtagttagccagtccaaggcgcatgtcattgacgaacatcaggccgttattcggatcgaccgacacgctgccccagttcattccgccaagcgagcccggatactgcaaggagcggtcttcacccggcggtgtaaagaccccctgatggcgcatctctttgaactgaatacggcacagcagcaggtcaaccggggtggcgccccacatatccgattctttcaacgtttcgttgccgatcatcggcatgccgacggagtagggctgcgtcggcgagtagcgttcacctttgacgttgccggccgggacagggcgttcttccactttcgccaccggttcacccgtcgcgcggttaagcatgaagatcatgccctgcttgctggtttgcaccagtaccggcgtcgtaccgcctttaccgtccggcagatcgtacagcagtggttgcgaaggcaggtcgaaatcccacagatcgtgatgggtggtctggaaatgccaacgcactttaccggtggcggcatcgaccgcaacgattgatgagctgtatttatcatccagcgccgtacgttcgccgccgaagaaatctggcgtggcgttaccggttggcagataaatgagattcagtttggcatcgtaggacatcgcggaccaaacgttcggcgtcccgcgcgtgtaggtttgtccttccggcggtacgccggtcagctgcgggttacccggatcccaggcccaggccagtttaccggtctgcacgtcaaaagcgcgaactacacccggcggttcaccggtggagtagttatccgcgatgcgaccaccaacgacaacaaggttaccggccaccagcggggtagaggtctgctgataataaccaggtttgatttcccccatgccgacgctgagatcgacggtaccgtgttcaccaaatgcttcacaggctttaccggtatcggcatcgattgcgatcaggcgcgcatcggtagtcggcaggaacaggcggcgggcacaggcggcaggctgagtcccggccacggcattagcctgtgcctggctatcttcgtagtagcctaaaccgcggcaacgttgccagttcggcgccgtcgcttttgagtcatagcgccatttttctttgccgctatcgacatccagcgccaggactttgctatatggcgtacatacatacagcgtatcgccaatctgtagcggcgtattctggtcttccgcaccggaaccgttactctgcggaatatcgccggtatgggcaatccaggcaacctgtagctggttgatattgtttttattgatctgatccaacgcggcgaaacggtcgccgtgagtggtattaccccagtgctcccagtttttttgttcttcacctggctgtaccggttttaccggaaccgcttcgctggcgctgaccagcggctgggatttaaacatccaaccaaaactgaccagcagtaccacggccagcacgcccgcgagggtgaaggccgcgcctttttttgccggtgcgctggaaaggaaagaccaaacaatggcgcacagaaaagccagaacgccaagcgcaaacaggcgtgagaacagcggccagtaggtccagccggcgtcgctgatcgcccaaacaatggacgccgcgaaggcgacggcataaagaacgatgccgccgcgacgattgcggaaaataagcagggaggcgataaccatcaccagtcccataatggcgaaataccaggtgccgccgacgcttgccagtttggcgcctaaaatgccgattgccagaccgatgattaacatcagtccggcgagtagccactgcaggatccgggggaatccgcgcggcacgttgcccgtagccatgttgtctccttataccaccccttgccaggcgtgtaccaaatgaatcaagtgcaaatagaaattgcttttgagtgaagctgttcaaagcttcataaatgtgatttcaaaagatgaattcatttcacatgaaccaaatggtgaaatcatggctatgataaatctgttaatgaaatgagcgcaaatgttaatgaatgatttcgcactaattgattagcgcgatgtatatattaagtggcagaagaatgaacgtagcggtgccgttacctcaatgtgctgattcggggtaacggccactgagagtcagccaggcatggatttgcgtatcgcgctcagtagagtttgcgccccctgcgacaggctggcgtccacccgggtaagaataccgatcggctcgccggcgccttcggtggcgataggtaatgaggttaacaaaccgcgacgcaggtcgtctttcaccgcgccggaagggacgaaccagacatagtcgtaatcgacggtgagctggcgtgaaagcgaggccgacagcgtttcaatacagccggggggaattttacaaccctggctttgcagtagcgtttccgcattctgccgcgggattgtccctttcggtgagaccaccaccggccattccatcacccggctgagcgttaccgtctcctgcagcagcgggtggccggggcggacgaccagctttagcgattcaagaaacagcagttcatagttgaggccgctcatcagttctggatcagacatgcgcccgataccaatatcgacatcgccggattttagccccgccagcagcatggtgttattcatggtggcgacctgtaaggtgatgtctttttgctgtttatgaaattgaccaatcaccgtaggtaaaataccgagcgccgcggttggcagggcgccaatccgcaccacatcgctattcatgccttctttacgattgagagcctggcctgcggtattgagggcatccagtaccttaaccgcgtgggtaagaaactgttcgcctaccagcgtcaactgcgcgccaagccgcccgcgctcaaagagacgggtaccggtcaactgctccagctcgttgagcgtttttgatagcgcaggttggctaagattcagggtttctgccgcccgccccagggttccctgctgtgcgacggcgacgaaagtatgtaaatggcgcaagcgaatgcgctgactgaagagaccatttttttccataatcgatgttaaaaacagagctgtctcggtagcaagcgaagttgtttaattttgataactagttagcaaaatattattaacatttgatcttattgtcttacaagtcatttctgtcaggcgcgataaaaagccccgcactcggcggggctggaaaaaagggatgttttggtgggaaattaaatatcgaagaacacggtctctttatcgccctgtaaataaatatcaaagcggtagacgacttcatctccacgcacttcacgttgcgcgataagcgtctggcggcgaacttcccattcaatcagattcaataccggatcctgttcatttgccgcctgctcatcagcaaaatacatccgcgtattcaggccgatgttgataccccgcgctaccacccacagattgaggtgcggcgccatcatgcgtccgtcacggccgacgaccgcgccgggtttgatggtttgaaagcgccagacgccggatgcaaagtctgaacacgtgcgcccccagccgcggaagtttgggtccagagtcttactctgctgacggtcgtcgggatggttataacgcccgtcggcgttagcctgccagagttccagcagcacgtcgcgtaccggcgttccggaaccatcgaaaacccggccttcaatcgtaatacgttggcctttggtttccgcgctcactaagttggggccgaagtttttttcgaaaatatgaaaccctgcagcgtccggcgccagaccaatatgcacataaggcccggcagtctgcgaggcggtttcagctaaatagtctttcattgggcggccccctgagtacgattttcgaacagcgtggcgcgatggccgcgcagcacaagatcaaaacgataggccaggctgtcgagcggcacggcggcgtgggtatccagctcggcaatcagggtacgcacggcatcatcgttattgatggttctgacaatcggacactgtttaataagcggatcgccttcaaagtacatttgggtaatcagccgctgcgcccaggcatcgccggagagcgaaaagtgaatatgcgccgggcgccagtcgctaacctgattacgccacggataggggccgggtttgattgtgcgaaaacagtaataaccgttttcatcggtcagcacccgtccacagccgccgaagttggggtcaatcggcgccagatactggtctttcttatggcggtagcggccgccggcattggcctgccacacttccaccagcgtatttttcattggtcggccaaagccgtcgcgcacgtaaccgtgaacaataattcgctcgccaatcggcaggccgtctttggcgtagttgaggatgagatcgttatccagcaggccaaggtcgtcgctgctgaacaccggaccggtaatttcagaaagtgaattttgcagggagatgagggcattacgcggcgagcgcagcacactagttttatatcccggtgccagcgccggcggatggctattgtaatcgcgatgtacaacctcgcgcggtgaccatttattattcatagggtactccatcaatcggaagagaggcatgttgttgtaatgtcgccagaaacagtctctgtaaatgttttgttaatttaaagtgaaattaaatctaatctttcataacccttggttatgatttgtgcaggcgaaacgcggtagcaggttatccgcatcacagtttgtaaattcttcccgccactcttaacgcgctttcctacactccaggaagtattcactggaggtaagacatcatggcgaacaccatcacggctgatgagattcgggagaacttttcacaggctatgtcggcaatgtaccagcaggaagttccgcaatatggaaccctcctggagttggtggcggatgtgaatctggcggtcctggaacataacccgaaattacatgaacaattggctaatgccgacgagctggcacggctgaacgttgagcgccacggcgcgatccgcgtgggaacggcggaagaactggcgaccctgcgtcgcatgtttgccattatggggatgtatcccgttagctattacgatctgtcgcaggctggggtaccggttcactccaccgcatttcgcccggtcgatgacgcggcgctggcgcgtaacccgtttcgcgttttcacctcattgctgcgccttgaactgatcggcaacgaggcgctgcgccagcgagcggcggatattctcgcccgtcgcgatatatttacgcctcgctgccgtgaactcattgcgttacacgaagatcgaggagaattcacggctgcagaagcgcgtgaattcgtcaccgaagcgttggaaactttccgttggcaccgtcatgccaccgttgacgagcaaacctatcacgcgctgcataatgagcaccggttgattgccgatgtggtctgtttccccggttgccacattaaccatctgacgccgcgcactcttgatatcgatcgagttcaggcgctcatgccgcaatgtggtatcgaaccgaaagcgctcattgaggggccgccgcgccgcgaggtgccgattttactgcggcaaaccagttttaaagcgctggaagaaccggtgatgtttgctggtgaacataaaggcacacacagcgcgcgctttggcgaaattgagcaacgcggcgtcgcgttgacgccgaaaggacgagcgctgtatgaccgcttactgaatgaggccggggtcggtaaagacaaccttaaccaccagcgccatttgcaggaggtctttagcgaatttcctgacagcgaatttctgctgcgtcagcaggggctggcgtggtttcgctatcgcctgacgcctacgggggaagcgcatcgccatgcttttggccccggcgacgatccgcaaccgctgatcgagcgtggttgggtagtcgcgcagccgattgtttatgaagattttttaccggtgagcgcggcggggatcttccaatcgaatctgggcaacgaaacgcaggcccgcagtcacggtaacgccagccgtgaagcttttgaagcggcgttaggctgcgaggtcttcgatgagttcgagttataccaacaggcggaggagcggagtaaacgccgttgcggtctgctctaaaatcggtactctgcatggcataacttgcaaaaggacgttgttatgcagaattcatctacgccgctggtgaaaacgcggcagggcacgttatccggcactaatgaacaggggatccatatctggcgcggtattccctacgcgcagccgccggtgggcgagctgcgttggcgttcgccgcagcctccagagcgctggcagggcgtgcgtcaggccgatacctttgccgccgccagctggcaggatatagagtattgtcgtgaacttggcggcggcgatcctggccgtttctcggaagactgtctctatctcaacgtgtgggcgcccgccgcccgctcgcagccgctcccggtgatggtctggcttcacggcggcggctacaccattggcgccggcagtctgccgccctacgacggtagcgcgttggccagccgcgaggtggttgtggtcaccgtgaactatcgtcttggacacctcggctttttcgcccatccagcgttggaaggcgaagagggcgagcggttgtataattttgcactgctcgatcagatagccgcgctgcgctgggtgcaggataatatccacgccttcggcggtgatgccgccaatgtcaccttgttcggcgaatccgcgggggcgcgcagcgtcctgtcgttaatggcgtcgccgaaagcgaagggattgttccataaagcgatcgtgcaaagcggttataccttaccggatttaccgcgggaaaaggcgctggccaagggaaagctgctggcggaacatttttctcttgccgatgccagcgcggaacagctgcgggcaatccccgccgatgccttttgggcgctaactgcgccgctgaatatcggcccggcgccgattgtcggcgatgcggtgctgccggagcccatgctcgacacgttctttaagggacgtcagcatgcgatgccggtgatgattggctccaatagcgatgaggccagcgtgatggcggtatttggcgtcgatattgccggtcagattcaaaaactgcgccgcgaacgccgttttggccttgggctgattaaactactgtatcccggcgttaaaggcgatgaggcgttagggcgggaagtgtgtcgcgatatggcgttcacgactttagggtatgttgtcatgcaggcgcagcagcgtctcgggcaaccgtgctggcgctactggtttgactatgtggccgaagcggaacatgaaacttatctccatggcgcctggcatggcaacgaagtggtttatgtttttgacaacctggcccgcgccgagccggtatgtcagtatgccagtgaggcggatcaagccttcgccgcgcaggtcgccgactactgggctaattttgcccgccaggcgggcaatcagtgcagtgagttaaccggcccggtacgctggcctgcctgccagcgcggacgggaccgtttattgcgtatcggcctcaacaagcgcgcgggctttaaagtggagaaccggtttatgcgcgcgcggctggcgctgtttcgtcgggtgatgaagcatcatgtgacgctggattaaccagcgcggcgcgaaagcgcgccagcccgtcggccttgctttgcgagcggcgaacaaccagccggtagctggcgccggttttgacgctaagcgagaaggggcgacatagtcgcccggttcgcagatccccggcaaccagtgtttcgtccgccatggccacgccgagcccctgcatcgcggcggtgatcgccagatccatggtgtcgaaatattggtttttatgcatttttagcgcagtttcatgcgggaagtgcgcaagccacagcagccagtcggttttatcgcgcgtcggatggagaaatgtagtgcctgatagctggggatcgcacggcgtatcgggactggccaccggcgtgagggcctcctcaaacagcaagtcgccggcgctttgatgggtgccgaagataatcgccgcgtcgtagggttcagtcttaaagttgacgcgatgctcggtggtggtggtcaacgccacctgcaattccggataacgtcgttctatctccagcagtttcggcaccagccagcggatcgcgcaggtaggcgctttcaggcgcacgacagtttgctgctggcgcgcctgctcggccaccgttatcaggcggccgaatgccgactgtagctcaggataaagcgcgctgccctgcggcgacagtcgcaggccccgggcgtggcgttcaaatagcgggaagccgaaccagttttccagcgcggcgatctgtcggctgactgccccctgcgtcaggcatagctcctgtgcggcatgggttaggttgagatgcctcgcggttatcagaaacgtttctacggtatgaaaaggcagggcgctacgcgacatgttggctccagctatgcattttgatcatgggcagtatgccacgcatcgttgcgaaattgggacgatgcgttccgtttttgccatctaatcgtcatccgctgcttacactattattaatctcgttgatacaacgtttctcaccgattagttgatgtgtataaaaggagccaccatgtctaaaccttacgttcgtctggataaaaatgatgcggcagtattactggttgaccatcagaccggcctgctctcactggttcgtgatatcgagccggataaattcaagaacaacgtccttgccctcagcgatctggctaaatactttaaactaccgactattctgaccaccagttttgagaatggccctaacggcccgctggtgccggaactaaaagaacagttccccgacgccccttatatcgctcgtcccggcaatattaacgcctgggataacgaagatttcgttaacgcggtaaaagccaccggtaagaaacagctgattattgccggtgtcgtcactgaagtgtgcgtggccttcccggcgctgtcggcgattgaagagggattcgacgtctttgtggtgaccgacgcgtccggtacctttaacccgatcactcgtgatgcggcgtgggatcgtatgtcgcaagcgggcgtgcagttaatgtcgtggtttggcgtggcctgtgagctgcaccgcgactggcgcaacgatattgaaggattgggaaccctgttctccaaccatattccggattaccgtaacctgatgaccagttttaacctgctgagcaagaaataaacagctggcggccagttttcaggcctggccgccgtttcaatcagacgggattattcacttatcgaggcgacatggtgcgacttggcactttgatgtttcaatagccgcgatgccagtacgcccgacatcatcgacccattcacattcagcgcggtacgcgccatatcgacaattggctcgatggcgataaaaatgccgaccagcgccaccgggaagttgagcgtagacaggacaatcaacgccgcaaatgtcccaccgccgccgacgcctgcgacgccaattgagcccagcgcgatagcaggaagtaagctggctaaaaacgagaaggacagtgggtcgatacccagcgttggcgcaatcatggccaccatgatagccggatagatcccggcgcagccgttttgccccatactggaaccaaaagaggcggcaatattggcgatggtattcggcacgccgaatttttcctgtgcggtaatggctaatggaatcgaagccgcgctgctgcgggaaacaaaagcgaaggtaagcaccggccacaccgttttaaagtagcgcagaggattttgaccgctaatagtcagcagaatcgcatgcacgataaacatcatggcgaccgccagataacaggcggcgataaagccaagcaggctggtgaattgcgctagctgataggtcgaaaagacttttgccattaatgcgaggacgccgtatggcgtcagcgctatcacgatacgcaccatcttcatcacccaaatttgaatcgcgttaatcccgctacttagtttttgaccttcctccggcgcctcttttttcaccttcaataacgcgactccggccagcagggtaaatataacgatgccgataaccgatacgctgcgcgcgccggtcaggtcgagaaaaatatttgtcgggatcagtgaagtgaccagttggggtaacgaaacggctgcggttttgctgacgtcttcggcggtcagcgtcgattgcatatggctaaaagcgctggcgttaaggccgagtaaatcagcggtaaacagtccgacccagcctgccaccatcaccagacatagcatgcaggcaacaatggttaaggacattcggccaataccggcgctattttcgagtttattaatcgctgacagaattgaaatgaaaatcagcggaaccgcgacaagtttcagcaaattaacatagccgttgccgacgatactgtaccaatcaatgaccgtttttcgcggttcgttggcaatgaaatggagtgataatccgagaagggcgccgagaaagatggcgataaaaacgctttttgataacgagtggcttttttgttcgagtttaaaaagtccccatgatgcgattaaaaataacgcgatatacgctggcgtaataaacataagatgtgcctcttgccccattcagcacctgaaatgccggaaagagatttattccaaatttctctaaggctgtgaaaaaccttagaaccgctggggattataaagaattgaatagcataaggcatataaaaattgtggtttatgtcctgagtgttagtcctgtcatatttcagcaggggccctgggaggcatgatcgaaatgcatagctcttatgataacaattcgcttgtcgcttgaaggcgctttagtttgaatggatatgcaaataaaacgagaaaggattaatcatggctcttagtgcttcggtcaccacccgctcgaaattgccggatgtcggcaccacgatttttaccgttatcggtcagctctccgcgcagcataacgcgattaatctttctcagggcgcgcctaactttgcctgcgacccacagctggtggccggcgtgacgcaggcgatgaccgccggacataaccaatacgcgccgatgactggcctgcgggccttaaaggagcgtattgctgataaaatcgccacgttgtacggcacgcaatatgatgtcgatagtgaagtgttggtcaccgccagcgccagccaggggatctattccgccattggcgggctggtacatgctggcgacgaggtgatttactttgagccatcgtttgatagctatgcgccgatcgtgcgtctgcaaggcgcgaccccggtggcgattaagctcaccgtgccggatttcgctattaactgggacgaggtacgcgccgcgattaccccgcggacgcggatgatcatcattaatacgccacataacccaagcggccaggtattatccgccgatgaccttaatcaactggcgatgctgatccgcaataccgacattgtggttttgtccgacgaagtctacgagcacgtagtcttcgatggcgaaaagcatcacggcatggcgacccatccgcagctggcggaacgcagcgtgattatctcttccttcggcaagacctaccatgtgaccggctggcgcgttggctactgcgtggcgccagcagcgctaatggatgagatctgcaaggtacatcagttcctcatgttttctgccgatacgccgatgcagtacgcttttgcagagcatatgcagaacccggcttcatggctatcgctggccgctttttatcagcaaaagcgtgatttgctccagcaactgctgcaagactcgccgttccgcttattgccgagcgccggctctttcttcatgctggcggattatcgccatttcagcgatgagcatgacagcgagatggttaagcggctgattaccgaatacggcgtcgccacgattccgctatcggcattttataccgatggtactgataacaaactgattcggctctcttttgccaaagatgaagccacattgcgggctggcgcgcaggcgctgtgccgcgttaagccgcgttaaggagccagacgatgaaaataaaagccctaactctagctttgggaatgctgtgtaccgtatcaagctttgccgccagcgagttgcgctacggcgtggaagcggaatatccgccgttcgaaagccgcaacccggcaggagagctgcagggttttgatattgatctcggcaacgcgatttgtcaggccgcgcagttgaaatgcagctgggtcgaaacctcctttgatgcgctcattccgggactggtggcgaagaaatttgatgcgattaactcggcgatgaacattaccgagcaacgtcgcaagagtattgatttcacccagccgatctaccgtattccttcacagctggtgggcaaggccgacagcggtatgcaggcgacgccggaagggctgaagggcaaaaccatcggcgtgctacagggctcgattcaggagacctttgccaaagaacactgggaaaaacacggcgtcacggtagtttcctacaaagaccagaacatggcatgggccgatctgcttaacggccgtatcgacgcctcgctggtgatgtccgcggccgggcaggccgggttcctcagtaagccgcagggtaaaggattcggttttatcggtaagccggtggctgatgatacgattctgggcagcggtattggctacggcttgcgcaagggcgatgaggcgaccaaaaaacagctcgacgcggcaattgataaagtgcgcgctgacggcactatcacccgtctggcggcgaagtacttccccggtatcgatgtcagtgtgaaataatctttatttgcggctctttgctgcgcaaagagccgcccgcattacatcagcaccaccggtttgatgactttaccggaagctgaatctgcgaaagcctgattaatctcttcgagcggatagaactcgataagcttatcaatggggaatttcccttgtttataaaactgtaccagctgtgggataaacagctgcggtacggcgtcgccttcaattacccctatcaatgatttaccttccgccatcagatcgttttgcacattaaaggtgatatcgccggtaaagccgacgaccgccaccgtgcctaacggcttaatcgcgtggatcgcctgcagaacgatggcggcgacgccggtcgtttcgatggcgtagtgcgcccctttaccggtcagttggcgaataaccgcaacgctatcttcctgtttgccattgatcacgtgggttgcgccgagttcacgtgccagctcaaggcggttcgcgtgaatatcgacggcgatgatttggctacagccggtgagctttgcagccataatggcgcttaaaccaaccgcgccgcagccgaataccactaacgattccccggccaccggttttagtcgatttaacaccgtgccgctcccggtttgaattccgcaacccagcggaccaagaagcgaaagttcgacatcacggtcgacaacaatagcattcgtcgctttggtgaccacatactgactaaacgaagattggccgaagaagacggataattcttgatcatccagacgataaggggtggtgccatcgtctaagcgtccaccaaagtttaagtcattgaaactttcgcacgcggaaggatggttggtgaggcagttttcacagtgatggcaggcggcgtagctcagtaccacatgatcgccaatttcgaccccacgaacggcatcaccgacgttaaccacgatacctgcgccttcgtggcccaggatggcgggcatcggcaggatcccggcgttatcgcggatcaccgcgtcggtatgacagacgcctgtagcgacaatttttaccatcacttcgtcttttttaggtgcgctaacctgaatatctttaatgctaaatggttgttgataacccaacgtcacggcggcttttactttcattagatactcctgacatttttccctggagagtagagattacacctggcgtgatgaaaatttatcctgttcgtgctgaaaataaacaaagcgggggtaaaaacgctgaggtctcgggtcgcgcctgttcgccaaaacagctcagcgatagcgatcgctgggtggttattcagtctgttccggtggacatcttttttttcatgcttttcgcctgccaacaattggattatcaatcatttttgtctagagtgagcggaattcacgacgcagatgtttgcaacgttgcgtatccgtcgaactctcaaaaaggacgcttttccaggcatgaaccgcagacgttttcttaaatcatccatggctgttgccgccgtatgcggaacgtcaggagtcgcctcgttattcactaaagcggctttcgccgcggattctgctatcgccgatggccagacgcgccgctttgacttttccgtcctgcaggcgatggctcatgacttagcccgccagccgtggggcggcgcgccgcgtgacctgccgccgacgctggcgaatctgacccctcaggcctataacagcatccagtatgatgcggcgcattcgctgtggaataacgttgaagagcgcaagctggatatccagtttttccatgttggtatgggcttccgccgccgggtgcgcatgttctcgctggacgcgcagtctcagcaggcgcgggagatacacttccgtccggagctgttccagtacaacgacgccggcgttgataccaaacagctggaagggcagaccgatctcggtttcgccggtttccgtgtgtttaaggcgccggaactggcgcgccgcgatatcgtcgcttttctgggcgccagctacttccgcgcggtcgacagcacttaccagtacggcctgtcggcgcgcggtctggccgttgacacctttaccgataccccggaagagttcccggatttcacgtcattctggtttgaaaccgtcaaacctggcgcgacggtgttcaccgtctacgcgctgctcgatagtccgagcgtcaccggcgcctataagttcaccgtgaattgccagcaaacgcaggtgatcatggatgtcgaaaatcatctctatgcgcgcaaggacattaagcagttgggcattgcaccaatgaccagcatgttcagctgcggtaacaacgaacgccggatgtgcgataccatccatccgcaaatccacgattctgaccgcctgtcgatgtggcgcggcaacggcgagtggatttgccgtccgctgaataatccgcaaaagctgcagttcaacgcgttccaggataaaaacccgaaggggtttggcctgctgcagctggatcgcgatttcagtcattatcaggatgtgatgggctggtataacaagcgcccgagcctgtgggtggagccacgtaatcagtggggaaaaggggccgttagcctgatggaaatcccgactaccggcgaaacgttggacaatatcgtctgcttctggcagccggaaaaactggtaaaagcgggtgatcaactggactttagctaccgcttgtactggagcgcgcagccgccggtacgctctccgctggcgcgagtgctggcgacacgcaccggaatgggcggcttcccggaaggatgggcgccgggtgaacactacccggacaaatgggcgcgccgatttgctatcgattttgttggcggcgacctgaaagccgcggcgccgaaaggcattgagccggtgattacgctctccagcggcgaggctaagcaggtagagatcctctacgtcgagccttttgacggctatcgtattctctttgactggtatccgacttcagattccaccgatccagtggagatgcgcatgttcctgcgctgccgtggcgacgctatcagcgaaacctggctatatcagtacttcccgcctgcggcggatcggcgtaactacgttgatgaccggattatgaaataacccaggtcattgaaatccgcccgcggcgcgcttctgcgggcgttgttgtttatcagtgagatatcgtcatgactgccgaaaacagccccatcatcgaaactatcccggtcaacgaacagctggagctgcgtgcggttgacgaacgttacgtcagcgaactccatcaattggtgctcaaaaaccgtgactggctgcagcatgctttaagctggcctgcggaggtgttgagtgaagatgaaacccggcgccacgtgcagggaaacgtgatgctgcaccagcgcggttatgcaaaaatgttcctgctgtttttacaggggcagatgatcggcgtcctgtcatttaaccagattgaaccgttgaacaagacggcctatatcggttactggatcgatcaaagccatcaggggcagggactgttgtcgcaggcgttacaggcgtttatccatcattatgcgcaaacgggcgccgttcgccgtttcgttattaaatgccgggtcgccaaccagcgcagtaatcaggtggcgctgcgtaatggtttccaactggaaggttgtctgaagcaggccgagtttttaaatggcgcatatgacgatcagaatatctacgcgcggattattgacccgcaataatcggctatagcgaacccagcagcggtgtgcgggtgatatgctcgtcgccgctcacgattttgcgcccgcgaagatgaattctgtcaccctccagcgcttcgatacaggcgttaccgcagatttctacctgttgttcgataatcacatcgcctcgaatcgtcgcatgtccttcgataagtatctcgtcatccagcagaatggggccgccgataagatgggcgtgcccgccgaccatgacacgatgctttaacaggcagttgccttcgaccacggcgttttcgcccacctgggaactgtagcgcagggtcgggatctgatcctcgccgcgcccggcgaccagccgcgcgcgatcgtagacccgggcgttgtcacagatccatacatcgttattttcattaccttcaatacgtgcgttatcgaacacttcggcacggtgttcaacaaaagcatgctcaaccacggcatcgccgtagatttgcgcctggtgaacaatccgagaggcgctgaccgtggcgcgctgatatatttgcagcactttgtcgatatcagaagtgagtcccagagcggcaatcaccagacagtgggggagaatacgcgcctggtcggcgattcggcagacgccacggatttgcgattgttttatagtgacgttgtcacttatcctggcgccgtgacttacctcaacattatcaagccaggcgttgtcgctaattgtcgccccgtggcttatcacgcaggtgccggtcagacgggcgttgtcgtcaacgcgcgcgccagcgaagacgacgctattggcatcatatatccagcagtcgccgccctggcttaacgcggcttcatcatcaagccagccgccttcgctaccggccttaacgtccgagaaatcagtcagcgccacgatttgccgcagagttacgctatgtttaattccgtcttcttcaaagtgatacaggcggacgtggtcgctcagacgatatttcttcatcagcatttctctttactgttggttaacataaacatagcaaaaatctccgtagcgcgttttataaggttcctttaaaatgcaacttaaaattaaattgaaactttaaataaaatgaataaacacgtaacgggcggccaggtgctgaatctaccggctggctattttggtatggtgctggggataatcggcatgggcttcgcctggcgttatgccagtaccatctggccggtgagcagtattattggcgatgcgctggtggtgctggcgacaactatctgggcgctattaatgatagcgtttattgcgcgggctattcgtttcccgtggagcgtgcggcaggagatgcgtcatccggtggccagcagttttgtcagcctgatcccggcgacaacgctattggtgtcgatcgcttttgctggctggcatcgcccgttgtcgctggcgttatttgctgcgggggttacgctgcagctttgctatgcggcctggcagagcgccgggttgtggcggggtaaacatccgggagaggcgacgacgcccggtttatatctgccgaccgtcgccaacaattttatcagcgccatggcctgcggcgcgctgggatttaatgatgccggactggcgtttctcggcgctggcgtcttttcctggctcagcctggagccggttatcctgcagcggctgcgcagcaacggcgagctaccggcggcgttgcggacgtcgctgggcatccagctggcgccggcgctggtggcctgtagcgcgtggctcagcgtcaatggcggcgaaggcgatacgtttgccaaaatgctatttggttatgggctgttgcagttgctatttatgctgcgcctgatgccgtggtatctgcagcagccgtttaatgcgtcattctggagcttctcgttcgggatttccgcactggcgaccaccggcctgcatctgggtcacggccagccgcacggatttttccatactctggcgatccccttatttatttttagtaacctgattatcggcctgctgctgctgcgtacctttcttctgctggtgcggggtaaactgttaattcgcgtagaccgtgccactttattgccaaacaaggattaatcatgacgactcgtgacgaaaactactttactgaaaaatatggcctgacgcgcacccactcagaagtggtgtatgcctcctcccagatgcagccgggacagacgctcgaccttggttgcggcaatggacgaaacagtctgtatctggcggcaaaaggttacaacgtcaccgcgtgggataaaaatcccatgagtatcgataatctggagaacattcgtcaggccgaagggctggagaacctgcagactgcgataaaagatctgaatacgctgagctttgatggcgagtatgattttattctttctaccgtggtgatgatgttcctggaagccaaaaccatccctggtcttatcgccaacatgcagcgctgcactaagcctggcggctataacctgattgttgccgcaatggataccgaagattacccttgtaccgtgggcttcccgttcgccttcaaacctgaagaactgcgtgactattatgctggctggcagttcctcaagtacaacgaagacgtcggcgaactgcaccgcaccgacgccagcggaaaccgcatcaagctacgcttcgccacgatgctggcgcgtaaaccggcttaatccgccgccagcaggcagagttgcagggcggttagataggaggcctcaaaggcgcgcagcggcaaaaattcgaatttcgaatggaaattgtgcgcgccggtgaagaagttcggcgtcagcagaccctttgccgagagcgctgcgccgtcggtaccgccgcgcatcggcgtgggttttggcgttataccgaggctttccatcgcggtgaacatcaggtcaatagcccggcggtcttcgccaatggcgttactgatattgctgtaagtatcgctgatagtgaattcaaccctggcagtagggtactgggcggcgattttctctgccgcttcgccaatctgttgtttacggcggttaaagctgtccagatcgaaatcgcgaatgtttgcctgcaaccttgtgctgttctgatcgccatgaataccgttaaaccatacgtagccttcgcgcccggcggtgtgctccggcgtctgctggcggtcgaaatagctcatgaagtcggtagccattaacagcgggttgaccaatacgcctttggcggacatcgggtgtgcggttacgccggtaaaccgtatctccgcagaggcggcgttaaagttttcataaacgatctcgccgagttcgcagcagtcgatggtccaggcaaaatcgacggcaaaacgcgataaatccagcgcttttgccccgcgaaggccaacttcttcgtccgggacgaacgccacgacgatatcaccatgcttatgttcggcggtcaggttttccagcagcgtcataacaacggtcaccgctgctttgttatcggcgcccagtacgctggtgccgtcgctgaaaataatctcttcatcacgataggccaggatttccggatgctcgtcaacccgtagccagatttgctgttccgggttaaggcagagatcttcgccagtaaatcgcaggatttgtggatgaatatccggcgacagtccgacatcaacggtatcaatatgcgtgataaagccgatccgcggcgcaccggggacggtgcctttttttaccgccgtgacggtcgcatgctcgtcgacaacgatatcgtcaaggccaaactgacgtagctcgtcggctaacgcccgcgccatctgatgttgtccgggcgttgtgggtaacgtggttgctcgtggatcgctttggctggtgatagccagatagcgaaagaagcgctgggttaattgtctggttaagggcgaggccatagtgtttccttctatatacccgtcatacttcaagttgcatgtgcgttggctttcctcactcaccccagtcacttactggagtaagctcctggggattcgctgcgtcgccgccttcctgcaactcgaattatttagggtatagttatttttaaggtgtttgcaatctggctttagtgttatctatgggcaataaaacaaaaagctattcattagtcaaaaaatgaaaaagggaaacgcatgcaacgcacatctacttcaatagctctgacgatagcggcattagcggtgagttccgccgtgaatgcgaaaacactggtttattgctctgaaggctcgccggaaaactttaatccgcagctttatacttccgggaccagcgtcgatgccagcgcggtaccgatatataaccggctggtggactttaaagttggcaccacggaattgcagcccagcctggcggaaagctgggaggtgagcgaagatggtaaagtttatacttttcacttacgcaaaggcgttaaattccaaagtaataaatattttaaaccgacccgtgattttaatgctgatgacgttattttttcgtttatgcggcaaaaagatccgaataacccctatcataatgtctctaatggcaactactccaattttgaaagcctggagtttggttcgttaattaccgcaattgataaaccggatgaatatacggtgcgttttaccctcgcgcaccccgaggcgccttttgtcgctgacctcggctggtattttgcttcaatcctctctgcggaatatgccgatgcgatgctaaaagccggaactccggagcgcgtcgatatggatcccatcggcaccgggcctttcaagctggcgcaataccaaaaagattcgcggatcttgtttaccgcatttcctgattactggcagggaaaagcgaaaatcgatcgtttagtatttagtattacgcctgatgcctcggtgcgttacgctaagcttgagaaaaatgagtgtcaggtcatgccattccccaatcccgccgatttaccgcggatgaaaaagaacccgcagatcaatctgatgaacaaagccgggcttaataccggtttcctcgccttcaacacgcagaaagcgccgctggataatgtgaaggtgcgccaggcgctggcgatggcgatcaacaaaccggcaattatcgatgcggtgttccacggtaccggtacggtagcgaaaaacctgctgccgcccggggtctggagtgctgatgccgatctgcaggactacagctgggacctggaaaaagccaaagcgctgctgcgcgaatccggtgtgaagagtcccatcaccatcgacctgtgggcgatgccggttcaacgcccctataacccgaatgcgaaacggatggcggaaatgatccaggctgattgggctaaaatcggcgtgcagaccaaaatcaccacctatgaatggggcgaataccttaagcgggtgaaagacggcgagcatcaggcggcgttaatgggctggactaccgcgaccggggacccggataacttctttggcccattatttacctgccagtcggccaacggcggttctaattcggccaaatggtgctatgcgccgtttgataaaattatcgccgaagctaaaaccatcaccgaccggccgcaacgagaagctttgtataaacaggcacagcagatgatgcacgatcaaatgccggccgtgatgattgcgcactcaactatttttgaaccggtgagtaaatcggtgaccgggtatgaaatcgacccatttgggaagcatattttttatcaggtggacgtaaaataagcaccgtaaataaatccgccgcattggcggatttattttttgcaaggagttgacggaccaccatttttgtcacaaaactaagcgtgaaattttgttataaaccttgccgacaaactgcatttacagggattatccatgcgtacaaaaatgttatttaaagtagccgctctgggcgggctactggcattaactggttgtgcatccaaactggcgcaaccggagcagtattccgggtttttaaaagattattctaagttaaaagagaccacttcggcttccggcaaaccagaactgcgctggatctccccggactacaatccgagcaactatgacaacgtcgtctaccgtccaatcacctactacccggtgccgaaaccaacgacccaggtaggggagaaagcgctgcaggacatcctcaattacaccaacaagcagatgaaacaggccatcagcgaacgtaagccgttggcgaccacggctggcccgcgcagcctgattttccgcggcgcaatcaccggtgttgataccagtaaagaagggctgcagttctatgaagtgatcccggtggcgatgattgtcgcgggtacccaggcggcaaccggccatcgcacgatggacacgaatctctacttcgaaggcgaactgatcgacgcgaagaccaataagccggttattaaggtagtgcgtaagggcgaaggtaaaacgctgtctaatgagagcacgccgctgaccgctgatacgttgaagcaggtgattgatgatatggcgatcgatgcggtgaaattcgatccgtcgcagaagtaattgatgcgttaagcccgtcttgcgtgttgcctgacgggcttagtattaagccagccggcggcgcataaacagctgttcggggcgggcgaacatcaccagatttcctaccagtattaacgccagacctatcaccgcgttgctatgccagacgtaaccttcgtagaaggtggagatagttaatgccaccagtgggaaaagcagcgtgctataggccgctttgctggccccgatacggcctaccagagtgaaataagcgccgaacgcgatcaccgaaccgaacaacgccagatacagcagggcgcccatataactccaggtccactgcggcgtaaagttatcgccgcgcagcagcgcgatcgcgcccatcaccagggtgccgtaaaacatggcccagctattggtggtcaatgtctcaagcccgcggcgttggtggcgaatactcagcatgttgcccaatgaaaaaccgtacgttcccagggcgctcaggccgattccccatagcagcgacgcgttcagaccattggcgaggagatcgtcccagaagagggtgacaattcctgcgagccccagcgccgctgccagccaaaagcgccccggcggctgctggcggaagaaaataaaactgttgatcgcgttaaataagaccgccatcgaaaagatgaccgactcaaggccggtattgatatgcgccgcggcggtataaaaacaccagaagttaaagcaaaagacgcagcagccttgcagcatgcaaaagagatgatcgcgcattgccagcgggcgcaggcggcgggtcatcagcaaaatcgtcagcattgtgacgctggcgacggcaaagcgccagaaaatcgataccggcgcggcgacggggccctgttgtaaaaagattgcaatccatgtggtaccccagataaccaccaccagcccgtagagtaatgcgttcaaaatgtctctcctttaaaatgcctggcgtaagtgtgcgatttttccaggcaaagcgctgtcaccgttttgttgctgacttgcaaaatcttgcgcttatttttcacaagctcatggtcaatgctggtaagcggtgatgacaattcatagactagaggtctgcggattaaaaacgatgtgaaggctatggcatacgggacgttcgaaacattacaacaacaaaatgcggtgctgcgggggaccgtggaactcaattccgggatccagcttgccgcgtggtacaacgaccttgaccggatcacggtgcgcagcgaccaccacacgttgagcctgtatgtcgccgatggttacgaaagctaccaaaaaacaccgtacggctggaagaatggcggcgggccggaccgtttttgtctgatgccaaagggcgatgaaagcacctgggatattcgcggcgatctctctttcgttcatctctattgcaccgatgagcacctgcgtcgcgtcggcgagcaaatttgggatcgcagcccggcgtctttcagcttgcaggaaaaaacctttgccagcgatgacaaaattaccgcggtgtatcgccagtttctgcttgataacgactggcgccagcaggctaatcaactgctattaagctccgccagtacgttgctgttaacacatctgattcaaaactattcgaacgtgcagtggcgcctgccgacggttaccggtggcctggcgccgcatcttttgcgtaatctgttggcgtggattgaggagcacctcgagcagccgcttacgcttgccgatcttgccgcacaggcgtcgcttagcgagtaccattttgcgcggatgttccgccagtcaatgaatatggcgccgcaccagtatgtgatgcagcggcggatgattaaggcgcaaaatctgatttgccacacccaacagccgttgaccgagattgcgctggcctgcggatttagctccgccagccactttagccaccgggttaagagcgccacgggtcttacgccaagccagctacgtgcggcgcagcgtggttaacagcatatagctgataccgccgaggaccagcccccaaaaggccgagccgactcctgccagagagacgccgctggcggtgactaaaaaggttaccactgcggcatcgcgctcgttttcttgccccagcgcttgatagaggctgccgctaatggttcctaacaatgccagccccgccagcatctggatccacaccggcggtagcgccgccataagcgcggttatcgaaccgccaaatagccccgccaacagataaaacacaccggccgccgctgcggcgagccagcgcttatccgcatccggatgcgcatccgggctttgacagatcgcggcggtaatggcggcgatacacacggaatagacgccaaatggtgagaataacaacgccagcgcgccggtaaatacgataagcggcgagaccggaacccgatagcctgatgcctgaatggtcgccagccccggcgcattctgtgacgccatggtgacaaggaaaaacggtacaccgacgctgagcagtagcgaaggggtgaactgcggcgtaatccactgcggagcaacaaaaaccatatcgtttgccactggcgacagcgcgccggttagcagggcaatgatcccgcctgccgctaacgccgcaacgaccgcaaaacgtgggtagagcgctttgcataacagccaggcggcgaacatcccgccgcatagcgggagattatcctgcaaactgctaaatgcctgcagaccaaaacgcaacaggatccccgccagcattgccgccgccagcgaatgcggaatgatcttcatgaggcgggcaaacagtcccgtcacgccgcatagcaggatcagcgcgttggcgaaaacaaatattcccaccgcctgcgctagcgtcgctccctgtaatccactgaccagtaaagccgcgcctggagttgaccatgcggtgaggatggggactttacgccatagcgttaataccagcgtgctgacgcccatcgccaggccaagggcggtcatccagccggctatttgcccggcatcggcgccagcggcggcggccgcttgccagataatggcggcagaactggcatagcctaccagcacggcgacaaatcccgcgagcagcgtggggatgggaagggtaaaggagcgcatgaacacctcttgtgcgttataacatacgacgaaggtagcattgtgcgttatagcgtacaactggtaatatcaagaaaatgatgaggagccatccatgaatattgcgcaacatctggcaacgacgctgaaaagcctgcgtcagcagcgcggctggagtttgtcgcggctggcggaagaaaccggggtatcgaaagcgatgctcgggcaaattgaacgtaatgaatccagtccaacggtcgcgacggtgtggaagatagccaccggccttaatgtggcgttttcgacgttcatcgttgccgatgagacggctgcgcccgccgccttcgacccgcagcagcaggcgatggtagtgacgccgatttttccctgggatcctgagctacgttttgaccatttttcaattaccctcgtcccaggcgcgctgagcgaatcgacgccgcatgagaccggcgtcattgaacatgtcgtggtcattagcggttcgctggatttatgtctgcaggggcaatggcagacgttgcaggcgggagaagggcggcgctttgccggcgacctgacgcacgcttaccgcaatagcggcgcgcagacggcgcactttcattcactgattcattatccaaaagaaaaagccgcggactaatccgcggccaatcaagatgactgagactaaaattcacaacgtgacgaggaaaatccggaatacgcagccactgtaaccttgccgggttttcatgagaaatagctttttcttcaatgctttgccgatttctgcaaattcgctgtgcgggcgcggcggaaaatgttttcgtctacgcccagttctgactacaatagccgccatttcgaccccctataacggataacgacgagcgtatgcgcctgcaaaaccatcatcttgaacttcttagtcctgcccgcgatgccgggatcgcccgtgaagcgattttacacggcgccgacgcggtctatatcggcgggccgggcttcggcgcgcgccataatgccagcaatagcctgagcgatatcgccaacctggtgccgtttgcgcatcgctttggcgctaaggtgtttgtgacgctgaataccattcttcatgatgatgaactggaaccggcgcaacgtctgattaccgatctgtacgagaccggcgttgatgcattgatcgtgcaggatatggggataatggagctggatctgccgccgattgagctgcatgcgagcacccagtgcgatatccgcagcgttgagaaagcgaagtttctctctgatgcgggcttcagccagattgttctggcccgcgaactcaacctcgatcaaattaaagcgatctacgataataccgacgcgactatcgagttctttattcacggcgccttatgcgtagcctattccggtcagtgctatatttctcacgcgcaaaccggacgtagcgccaaccgcggcgactgctctcaggcttgccgcctgccttacaccctgaaagacgatcaggggcgcgttgtggcctatgaaaaacatctgttgtcgatgaaagataacgatcagaccgccaacctggcggcattgatcgacgccggcgtgcgctcctttaaaattgaagggcgctataaagatatgagttatgtgaaaaatatcaccgctcactatcgtcagatgctggatcgtattattgaagatcgcggcgatctcgcgcgttcttccgccgggcgcacagaacacttcttcgtgccgtcgaccgataaaacgttccatcgcggcagcaccgactattttgttaacgcgcgtaagggcgatatcggcgcgtttgattcgccgaaatttatcggcctgccggtaggcgaagtattaaaagtcggaaaagattatctcgatgttgaagtgaccgacgcattgacgaatggtgacggcctcaatgtgatgatcaaacgtgaagttgtcggcttccgcgccaatacggtggagaaaacgggggaaaatcgttatcgcgtctggccaaacgaaatgccggcagacctgcataaagtgcgtccgcacgaggcgcttaatcgtaacctcgaccataactggcagcaggcgctactgaaaacttccagcgagcgccgcattgcggttgatatcgcgctgagcggctggcaggaacagctggtgctgaccatgacctgcgaagacggcgtcagcgtcacgcatacactggatggcgaattcgccgaagcgacccaggcggaaaaagcgctggccaatttacgtgatggcgtggcgaagctcggccagaccatttattacccgcgtgatgtgcagattaatctgccggcgctgtttgttccgaacagtatgcttaaccaactgcgccgtgaaaccgcagagatgctcgatcaggcgcgcctcgatgcctggcagcgcggaacgcgtaaaccggtctccgtaccaccgccggtgtatccggaaacgcatctgtcgttcctggcgaacgtttataaccacaaagcgcgcgctttctaccagcgctatggcgttcagctgatcgatgcggcgtatgaagctcatgaagagaaaggcgacgtgccggtgatgattaccaagcattgcctgcgattcgccttcaacttgtgtccgaagcaggccaaaggttcgataaagagctggaaggcgacgccgatgcagctgattcacggtgacgaagtgttaaccctgaaatttgattgccgtccatgcgaaatgcacgtagtgggtaaaatcaaaaatcatattctcaaaatgccccatccgggcagcatcgtcgcctccgtcagtcctgacgaactgatgaaaacgctgcccaagcgtaagggcgcgtaagaaccattctcacggcgggcagttatgcgcctttgctttgcgcgcgtactgccggtgataatgttcgcgcagcgagctggcggtgtcctcagcccggctgcgtagttcatcgcaatcagcctcgtgcagtaatcgctgttcgaggctttgcaccgggaaataatcatgcccctgatgctgggcgagcagatgcccggaaaataacccacatatcaataccactgccgctattcctctccgccacatatcattttccatatcaatagataacgcgggatcaatatgattgatttaatattagtttttttatggcgttatcaaagaagcgcaaggctttgtcaggcgtggctgaagaggatgaaaaaagcctgacgcgatgagcgccaggctggagatgtgttatatcaggcacgaagcccggcggcgttcatcagcaggcggaaaatcatactgacggcgcccagtgccagcacgctagcgccccatatggctgccagccatagcagacgttttatccatgaatgcgccatcagtgatatccctcgccagtttgaactttgccgcggaaaacgtagtagctccagaaggtatacccaagaatgacgggaataatcagtaacgtgccaaccagcataaagccctgactttgcggcggcgccgcggcctgccataacgaaatccctggcggaataatattcggccaaatgctgatcccaagtccgctaaacccaaggaagacgagccccagcgtcaacacgaacggcagggtgtgagcatctcgttgcccaagcgtgcgccataaccagacgctgatggcgataaccaatagcggcaccggcagcaggtaaaacagattcggcagactaaaccagcgctcggcgatcgccggctgggagagcggcgtccataggctaatcacggctattatcatcagtaaggccagcagcagaaggcgtgaaattctgcgcatgatattctgcagcggattctcgctcttcattaccagccaactagcgcccagtaacgcgtatgcaacggtgaggccgaaaccgcagaatagggtaaatggcgtcagccaatcccacattccaccgctaaagctgcgaccgctgaccggaaaaccatgaatgaccgcgccgacgaccatgccctgggtgaatgtcgccagtagcgatccgcccagaaaagctttatcccagaaaggacggtgcgaaggggtcgctttgaagcgaaactcgaaggccacaccgcgaaaaattaggccaatcagcatcagggttaagggtaccgacagcgcgtcgataatcaccgcataggccagcggaaaggcgccgaagagaccagcgccgccaagcaccagccaggtttcattgccatcccataccggggcgacgctgttgaccatcacgtcgcgctcatcgccgccgcgtacggcggcaaacagaatgccgatccctaagtcgaaaccgtccatgacgatatacatcagggtggcaaacacgatgataacaaaccaaataaccgataaatcaatacccattagcgggattccttgtgctgaaaaccatccgtcgcggcagaaagcggacgcgccggcgtacctgatggcacaggcgtctgctcttgcggacctttgcggatcaggcgcagcatatagctatagccaacgccgaataccgagctgtagacggcaataaatgccagcaggctaatggtcatatgcagatcaccgtgagctgatacggcctcggaggtgcgctgtataccgtaaacgacccatggctggcgtccgacttcggtggtcacccatccagcaagaatcgcaatcaggccagaaggtcccatccataacgcgaagcgcaggaaaggttttgaggtatacagacgctgccgatagcgcagccatagggcaatgacgccgagcagaatcattaacattcccagtccggccatcagacgaaatgaccagaacacaacggttgagttggggcgatcttccggagcgaactccttcagcgccggtacctgtttatcgaggctgtgagtcaggattaggctgccgagggcagggatctccagcccatagcgggtacgttcttgttgcatatccggccagccaaagagcagcagcggcgtcggttcgcccggcggattttcccagtggccttcgatggcggcaattttcgccggttgatgtttcagggtatttagcccatgcatatcgccgatcattgcctgaatgggggcgacaagcagcgtcatccatagcgccatagagaacatcgcacggatggcgggggtgtggttgccacgaagcaaatgccatgcggctgatgcgcctacgaacaatgcgctgctaagaaacgccgcgacggacatatggaataagcgataagggaaagaggggttaaagataacggcgaaccagtcaacgggtacgacctgaccattaacgatttcgaacccttgtggcgtttgcatccagctgtttgaggcaaggatccagaatgtggaaatgatagtgcccagcgccaccatgcaggtggcgaaaaaatgcaggccggggccgacgcggttccagccaaataacatcacgccaaggaaaccggcctcaaggaagaaagcggtaagaacttcataagttagcagcgggccagtaatgctgcctgcgaactgagagaaaccactccagttggtgccgaactggtaggccataaccagccccgagaccacccccataccaaagttgacggcaaagattttcgaccagaaatggtatagcgagcgccagactggattttttgtttttaaccataatccctcaagcaccgccaggtagctggcaagaccgatggtgatcgcgggaaagatgatatgaaatgagacggtaaaggcgaattggatccgcgccagatgaaatgcatcaagaccgaacatgctggactccacaacaaaattgattcaacgcaattttaaggggtggcggggagtgatagcagaggcagaaatggggttttttatgataacagttatagactgttatcctttttatacatatttcatatttatgaaattagtatttatgtcatcatgaataatgaattgctggttgtgatctttttttaatgctacttcacatgtttttttacgattttccttagtgcttctcctgctttctattaattactctggtagattggaaatgtttggtgtttaatgcaaacgcgaggttcaagtatttacattttatatgtgaattctttatttattgttttttgatatatttagtgagtggagataagggaggcgacttgtcacagaacggactgcgaagtttgtgtatcacattggctctaatgagtatcttttggctggttgtgtttggcggactctatcttattttttgaattcaacggttacatccagaagagattgaatcccctgatgtgtaattaatttgttttatatcagtgtcttgtcgtttttttatgccaggtgcattgttcaatggataatggtttaggtgcgttaaattatgtcaaaaagactggcgaggaatgaatttatcttattgtgaattttccttagtggaggagttgttgattcataattaaatatcaaggcgtgtttacgttggcgccagttgggatctcaacgatagaccatgacgtatggttcataaatcaaatgaatattggtgattatgaagcgtttatcaatgtaacctaaatgcgaacattatattaacactagtagggtttgatggtatttcagtagtaaagttaacgcgcgaatattattcctgcactggttcaagaagcacattgttgtatatcagttattagaacctgccatttttagtcaactgttataagatatgagtctcgattgttaaatggatgcggtaatgaaaaagtatcagcagcttgcgcaacaattaaccgaccagatcgccctcggcgtttggcaacccggcgatcggctgccctccttacgcgaacaggttgtcagcagcggaatgagttttatgaccgtcagccatgcctaccagttactggaaagccagggacgaattatcgctcgtccgcaatcgggttattacgttgcgccgcagccggtgaagcagcgccaaccggatcccccggcgcaggtgacgcgtaatgaatccgttgatatcaacacctatattttcgacgtcctgcaggccagccgtcaggcgtcgatgctgccttttgcttccgcctttcccgacccgcggctgtttcctctacagcagctaaaccgttctttggcgcaggtgagtaaaaccgccaccgccatgagcgtgatcgagaacctgccgcctggcaacgatgagcttcgtcatgctattgcccggcgttatgcgttgcagggaatgaacgtgtcgccggatgagatcgtcattaccgccggtgcgctggaggcgttgaacctcagcctgcaggcggtgactgagcccggcgactgggtcgtcgtagaaaatccgtgcttttacggcgcgctgcaggcactcgaacgattgcggcttaaggcgctatcggtggccagcgatgtgaaagaggggatcgatctggccgcgttggaacaggcattacaaaattatccggttaaagcctgttggctaatgaccaatagccagaacccgctcggatttacgctgacggcagaaaaaaaagcgcaactggtggcgctattgacgcgctataacgtgatgctgattgaagatgacgtttacagtgagttgtactttggacgggaaaaaccgctacccgcaaagtactgggatcgtgatgagatgacgctgcactgcagctcattttccaaatgcctggttccaggttttcgtatcggctgggtcgccgctggccgacatgcccgccgtattcagcaactgcagctgatgagtacgctatcgaccagttcgccgatgcaactggcgctggtggattatctgtctaccaaacgctacgacgcacatttacgccggttgcggcgtcagcttgccgagcgaaaacagctggcctggcaagcgctactgcgttttttacccgccgaagtcaaaattcaccatagtgacagcggttatttcctgtggcttgagttgcccgccggcgtcgatgctggcgaactcagtgctctggcgttacgggataacatcagtattgcgccgggtaaaatgttttctaccaccgctaactggacctcattcttccgttttaataccgcatggggctggggagaaaaagaggagcagggagtcaaacggctcggcgaacttatacgtcaacttttgccttagtttattcatcgctgtttttttaattgccggtttatttttcccggcaattaatttccggcattctcgtatacattaatcagggttaaatacccgttaacaccgggctgtcatagggaatatgcatactcaaccctttgccataactccttgtctataatccatattatcgaatcgtggcggcgatttttgcggaatgcgccccgggtcacaacctgagtaaatttccccagagccccgcaggccgccgtctacccttattaagggagatatttttacggcacggctgccgctacctttattctgacaggagtaagttcaaatgagcaaaaaatttgcccgtggcagcctgtgcgtgctgagtatggtttttgttactgcgcaagccgcagaaccgccgacatcgctggataaaggtgaaggtcggctcgatattattgcctggccgggttatatcgaacgcggccagacggataagaattatgactgggtaagtcaattcgaaaaagagagcggctgccaggttaatgtgaaaactgccgccacctccgatgaaatggtcagtttgatggcgaagggcggctacgatctggtcaccgcatccggcgacgcctcgttgcgcctgattatgggcaagcgtgtacaggcgattaataccgcgctgatccccaactggaaaacgcttgacccgcgagttgctaaaggcgcgtggtttaacgtcggcgataaagtgtacggcacgccctatcagtgggggccgaacctgctgatgtacaacaccaaaaccttcccgacgccgccggatagctggaaagtggttttcgtcaaacaggatttaccggacggaaaaagtaaccaggggcgggttcaggcctatgatggaccgatttatatcgccgacgcggcgctctttgtcaaagcaacgcagccgcagttaggaattaacgatccctatgaactcactgaaacgcaatatcaggcggtgttaaaggttctgcaggatcagcatccgctggttcaccgctactggcacgatgcgaccgttcagatgagcgacttcaaaaacgaaggggtggttgcttccggatcctggccatatcaggccaatggccttaaaggtgaagggcagcccgttgctaccgtcttcccgaaagaaggcgtgaccggctggtctgataccacgatgttacatagtgaggcaaagcatccggtatgcgcttataagtggatgaactggtcgctgacgccgaaagtccagggcgatgtcgccgcctggtttggatcgctgccagtcgtgccgcagggctgtaaggcgagcacgctactgggagacaaaggctgcgaaactaacggctacaaccaattcgacaagattgcgttctggaaaacgccaattgcccaaggcggcaaatatgtcccttatagccgttggactcaggactatatcgcgattatgggtggccgctaagcgcctggagactgaacatgacgtacgcggtagagtttaatgacgtttcgcgtctgtacggtgacgtgcgcgcggtggatggcgtgagcatcgccattcgcgatggtgaatttttctctatgctggggccgtccggctccggcaaaactacctgcctgcgcttaatcgcaggcttcgaacagctatccggcggttcgattcgtatttttggccagcctgccagcgaattaccgccatggcagcgcgacgtgaacacggtttttcaggattacgcgttattccctcatatgtcgattatcgacaatgtcgcctacgggctgatggtgaaaggcatgggcaaaaaagaacgccaccttcgcgcccagcaagcattagaaaaagtggcgcttggctttgttcacgcgcgtaaaccttcacagctttccggcggccagcggcagcgggttgccattgcccgcgcgttggttaatcaaccgcgggtgctgctcttagatgaaccgttgggagcgttggatttaaaactacgtgaacagatgcaggtggagttaaaaaaactacagcaatcgctgggtatcactttcatttttgttacccacgatcagggtgaagcgctatcgatgtccgatcgcgtggcggtgtttaataatggtcgcattgaacaggtcgactcgccgcacgatctctatttacgtcctaaaaccgcctttgtcgccggattcgtcggcaccgcgaacgtttttacctctgaaatttctcagaggctatgtggcttgtccggcgcctggtcgttgcgcccggaacatatccgcctgaatagcggcggtgatatccaggtacaggggaccgtccaggcggtacagtttcagggcgcgtctacgcgtattgaactgaaactcgctgcgggcgataagctgttagtcagccaggccaacgtcgatggcggggcggcggttggcacaccgcagttggggcaacaggtatcagccggctggtcgcgttcggcgatggtttccctggaaaacggaggctgagatgacgatggcgcttgtgcaaccgacgaccgggcgagtgtcaggactgttctggcgaaaaccctcattgggcctgtttttactgctgctggggccgttgatgtggtttggcatcgtctatctgggatcgctcctgacgctgttatggcaaagcttctatacctttgatgactttacgatgtcggtcaccacggatttgacgctcgctaacctaaaggcgctgttcaatcccgccaactacgacatcattatccgtaccctggtgatggccatctgcgtgactatggccagcgcaatcctggcattgccgatggcctggtatatggcgcgttatacccgcggcaagatgaaagctttcttttatatcgcggtaatgttaccgatgtgggcaagttatatcgtcaaggcctacgcctggacgctattgctcgcgaaagacggcgtggcgcaatggtttctcggccatcttggcctggagagcgtgttaaatatggtattgaccatcccggcggtcggcggcaataccttgtcgacctccgggctcgggcgattcatggtatttgtctatatctggctaccgttcatgatcctgccggtgcaggcggcgctggaacgtctgccgccatcgctgttgcaggcctccgccgatttaggcgcccgcccgcaacaaaccttccgctacgtggtattgcctttagccataccgggcatcgcggcggggtctatttttaccttttccctcacccttggcgattttattgtcccgcaactggtgggaccgcccggtttctttatcggcaacatggtctattcgcagcagggcgcgattggcaatatgccgatggcagcggcgttcacgttggtgccgattgttctgattgcactctatctggcgtttgtgaagcgcctgggagcgtttgatgcactctgaacgcgcgccgttgattcttaaaatcgccacctgggggggagtgatatttctccattttccactgctgattatcgccctgtatgcctttaacacagaggatgccgcttttagcttcccgccgaaggggctgactttacgctggttcagcgaggcggcagctcgtgccgatatcattgaatcggtgacgttgtcacttaaagtcgccgccttatccacggcaattgcgctggtgttaggtacgctcgccgccggggcgctgtggcggagcacgttttttggtaagaatgccgtgtcgctgctgttgctgttgccgattgcgcttcccggcattattaccggtctggcgctattgacggcattcaaagccgtcaatcttgagccagggttgctcactatcgtagtgggtcatgcgaccttctgcgtggtggtggtgtttaacaacgtcattgcccgatttcgccggacatcatggagtctggtggaagcatcaatggatcttggggcaacaggctggcaaaccttccgttacgtggtgctgcccaatctgggttcggcgctgctggcgggcggcatgctggccttcgctctttcctttgatgaaattatcgtcactacctttactgccggacacgaacggacgcttccgctgtggttgttaaatcagctggggcgtccgcgcgatgtgccggtcaccaacgtggtcgcgctgttggtgatgctagtgacgactgtacccatcctgggggcctggtggctaacccgtgacggcgagtataacgccgaaagcggaaaataatacactttacaggatcatgctatgcaacataaccttttgataaacggtaaattagtggcgggtgagggcgaagtactgccggtattcaatcctgccaacggtgaagcgattattgagattgcggaggcgaccgaggcgcaggtcgatgccgccgtcaatgctgcagatcgtgcgtttgtcagctggagccagacaacgccgaaaactcgcgccgaatgtttactgaaaatggctgacgttattaccgaacatgcagaaacgctggcgaaactggagtccttaaactgcggtaagccgctgcattgtgttatcaatgacgaaatgccggcgattgccgatgtgtttcgcttcttcgccggcgccgcgcgttgtctgccgggaatggcggcaggagagtatctggaggggcatacttcgatgatccgccgcgatccagtcggcgtagtggcctcgattgcaccgtggaactatccgttgatgatggcggcctggaagctggcgcccgcgctggcggctggtaactgcgtggtcattaaaccttcggaaatcactccgcttacggcattgaagttggcggagctcgcaaaagatattttcccggccggggtcattaacgtgctttttggccgtggtccaaccgttggcgatccgctcaccggccacagtaaagtacgcatggtttccctgaccggctcgatcgccaccggcgcccatatcattggtcatacggcttcttcgattaaacgtacccatatggagctgggtggtaaagcgccggttatcgtttttgatgatgccgatattgatgccgtcgttgaaggcattcgcaccttcggtttttataacgccggccaggactgtactgccgcctgtcgtatctatgcgcagcaaggcgtctacgatcggctggttgaaaaattaggcgctgccgtggccagcctgaaaatggggcaaccggacgatccgtctacggagctggggccggtgagttctcttgcgcatctggagcgggtgacagcagcggtcaacgccgcacgcgctttaccgcatattaaagtggtcaccggcggcagtcgcgctgcgggtaatggttactatttccagcccacgctgttggctggcgcccggcagcaagatgctatcgtacaacgtgaagtttttggcccggtagtcagcgttacgtcgtttagcgacgaggaacaagtgttaacctgggctaatgattcgcagtatggtctggcctcctcggtatggacgcaggatgttggtcgcgctcatcgtctgagtgcgcgattacagtacggttgcacctgggtaaacacccatttcatgctggttagcgaaatgccgcacggtgggcagaagttgtctggatacggcaaagatatgtcgatgtacggcctggaggattacacggtggttaggcatgtgatggtgaaacattaaacattaacgtaccggcagaattatcaggctaatagttgcaatagcaacaaatgttaaaacagataaggggtaatatgagagtattcttataccccttcaagagctaagccattgtgagtgccggagataagcgccggatggggtgtaaaccattaagagtctgttcttaatcattatgagatccctgcagattaatgcggggattttttttgcgaatcgccttttatatcgatgccacaattaacgtttgtcttttttagaaggcaaacccgaatggcggcgctcacgaatataagagagaaggctgtagatagctaccaccaataaaactaatgctattaatagcgctgctattcctgacataagcaacctcaaaataagtaagagaaaaagcaaatacgttataacgaatagtcatgaacctatgcggaaaaccgtgaatttgcaaataataatttctatcacttaatcgaataaatagcacaaattaacaaatgaaaatgtcgaatccgcattacctatatggttgaggaagttgtttgttgattatctgcacaagccaatttaagaaaattctcaccccttaagtccattgtagccaaatatgtataacaccgtacgaggagtgtcagatcattttgttattgccaataatataaatatccttccgctggcaagaggtcatagggcggatagcactcgatgctttctataccggaagacaataattgtagcgataatgttaaattcacggcatggatcgtagcagtagcggtgacgggtgtgtatgtgatttgactttgttggggcgctcatgagaaaattttacataatttgttattctgaagttgaattggtttgaaaaagctagcatatctcttgttactcatcggcgtaagcgcaatgctttacggtaatctccctgcccagcgtattagtcgctgtgaaagccagggggcaactgtgggcgtttgcgcaatggttgaatgggatagcgaaaagctaaatttcttgccgcaatataaccctgaaaatcataagattatcgcggtgcttcagcaacaagatgctggggaacgcgcgacaataaaatcataaaaaaaagcagccattgaagctgcttttttaggtttagttgctgaaaaaattactaaagccaaccaaaacgaacggataacaggctaataagcgcaagcgctgcgccgacattaatcagaattacggttttgctggaaacatccataacgccacctttatgagtaagcccctacatttatagtcggtcgcatagagttgcgctatcggacaacactgaatcgatcgttattccatggtctttgcagcggtttgttttgtgaggtattgatctctgacgtcctaagtggtgcgggagatggcgcgcattgcgcgacgtctgacagggaaggaaaaaaatgactttataccagaaaatgctggttttttatgccgtaatgggctgtatctgcgcgttgataagctggtttttaactaaggaaagccgttgtattcgcctgctggctgcgttgctgattggtgccacctggccattcagcttccctatggcgctgctggtttctctattctgaacaacagaaatggctggcctaattgtcttgatggctgtatataaatacagttaaaaataataaggatgccatctgatgaacagcttctattcgcatttagccggtgcaacggtccgttggtttgatttccaaggccagggggaccctattgtgttcattcatgggttaggttgcgcctcttcatacgattacccgccagtggtttctaaccctatattgaatgggcgccgggccttactaattgatcttccaggctatggttacagcgataaaccgcttcagtttggctaccgaattgctgaccaggctgcggtcgttgtggagtggctgaacaaattacaggtcagccgctgcattctctacggccatagtatggggggcagtgtggctattgaggcagcgcagcggctgggcaaacgcgttgaggccttaattgtcgccgagcccaatctctatgccggtgggggattctatagctgtaaaatcgccgggcagacggaagatgattttatcgccaacggctatcagtcgatgctggcggaagaaacgtccccatggaaaggttgcctacaaaacagcgcaccgtgggcgttatggcggggagctaccagcctggtagtaggcgcttctccctcgtggtttgagagttttattcacctgcaatgccgcaagacgcttatctacggtagtttatcgctaccctcacaggaagcggaagatgtcgaaactgcgggtatcgcattggctgtcataccacaggcggggcattcgatggcatgggaaaacccggccgcgctggcgcgcgtgattgccgggttgctctgaaagcattgcgggaaatcagaacggtaattcgcgcgggcgagtttgcatggttatccagcgaagttcggtgaattcagcgatccctgcgcgtccgccgaagcggccatagccggacgatttacagccgccgaaaggcatctgtgcttcatcatgtacggtagggccgttaatatggcaaataccggtttgcaggttctgcgccacattccaggcgcgagcggtatcgcggctataaaccgctgccgccaggccgtattcgctctcgttagcgacggccagagcctcctcctcgccgttgacacgaatcaccgatttgaccgggccaaaagattcttcatgccatattcgcatctcacgcgtcacgccatccagcagggtggcgcgcatttgcgttgattccgcctttccaccgcagagcaaacgagctcccttgttcagtgcatcatcaatcaacgcgttgcagcgttgtaccgttttcatatcgaccaccgggccgagaagcgtagaaggcagcgcggcggcgcgttggctgattaatgcgacgaactcatccgcgatgctctcatcgacaattatgcgttcggtggacatacaaatctgtccggcgttagcgaaagcgccaaaaatcgcgcccgccgccgcctgctgaagatcggcatcatccagtaccagtagaggcgctttgccacccagctcaagaattgccggtttaaggtattctccacaggtgcgggcaataatgcgcccaacgggggtcgacccggtaaaattcacgcgtcgtacggcggggtgagcgatcagcgtttccaccagcgcaggcgcgtcggctggcgagcaggtgagataattcaccacgccgtcgggaaagcccgccgcggcgagggcatcgatgactaagctatgcgtcgcgggcgagagttccgagcccttgagaatcaccgtattgccgcacgccagcggcgtggcgatggctctggtggccagaatcagcggtgcgttccacggcgccatagccaatacgatgcctgcgccctgacgcaagcccatcgccagattacccggcacatcagagggaatcacttgtccttctatttgggtggttagcgctgcagcttcgcgtaagatatctgccgccagatgcacgttaaatccggcccagtgcgccgtcgcgccggtctccgccgccatggtagcaataaatttcgcctctctaagctgcatttgcgcggcggcttccagcaacagccggcgacgctcggatggggcgctgtcccgccatgaagggaatgcggcggcggccttatctgcacagcaacgggcgtcattgaggctggccgctgcggcggtagaggctgtctcgttattttgcggatggcgacggataaaagtggcgcggctttcggcatcgtgccagcggccgccgctatataagctgcaggttatagtcattagcgtaacctcattggtctgcggagtgtcgagtctaccgccatacctcattgcgcagcggcgaaagggcggttatcgcacaacttttttgcagatttctcagcgggtcacaacttaataagataataatgacgaacagaaaagcgaggacggacacatcagaaatagaagtgccgcaaacagcgctaaccttatgagttaaagtgtgaatctaatagcgattcattatttgctggttgtattacgctgtgctgttattagtgggcatataacaaatttataaggtttataaccatgtctacagggaaatcactacttgcactggcactaagcgcactgctgccagccggcaccgcgttggctgcggccaacgacacgctggtctactgttcggaagcctcgccggaatcctttaacccgcaaatcgccagctccggtccttccttcgttgccagctcgcaggtgctctataaccgcctgattacctttgatccgcttaaaaacacaccgattccgtcgctggcgaccgaatggaatgtgtccccggatggtaaaacctggacctttacgctgcgtaagggcgtgcagttcaacagcaataaatactttaagccgacccgcgatttcaatgcggatgatgtgctgttctcggtgctgcgccagcaggatccgcagcatccttatcacaacgtgtcgcagggcaattatgaatatttccacgacgttggtcttgataagctgattaaagaagtgaagaagatcgatgattaccaggttcagtttgtgctgagcgagcccaatgcggcgtttctcgccgattgggggatggacttcgcttcgattctttctgctgaatatgccgatgcgatgttgaaaaaagggacgccggaatacgtcgatagctggcctattggtaccggcccctatgcgctgcagcagtacaaagtggattcacaaatccgctatatcgccaatccgcattattgggaaggtgaggtgccgactaaacatctgatcttctccatcacgccgaacgttgagactcgtctggctaagctgcagaccaacgaatgccagatcattcccgcgccatcgccggtacagttcccggtgattaaagggaataaagatctggcgttacacgcggtggaggcgttgaacgtggggtatctggcgtttaatacgcaaaagaaaccgtttgataacgtgctggtacgtcaggcgctgaactacgccaccgacaagcaggcgattgtgaaagcggtcttcctggattccggcaacgtggcgaaatcgccgatcccggccaatatgctcggttacaaaaaggatctgccggattacgactacaatccgcagaaagcgaaagcgttacttaagcaggccgggttggagaagggcgcagaagtgaccctgtggtcgatgccggtacagcgcccgtataacccgaactcgaagcgtgtcgctgaaatgattcagaacgactggagcaaagtcggcattaaagcgaaaatcgtcagctatgagtggggcgaatacctttccggtatgcgcaagggcgagcatgatagcgcgctgtttggctggatgtccgataacggcgatccggacaacttcgctggtacgctgctcagctgtgataatatcaaaaccggctccaacgtagcgcgctggtgcgataagtcctatgacgcgctggtgaaaaaagcgcttctggtgagcgatccgcaggcccgcgacaaactctaccaacaggctcaggaaattttctatcagcaggcgccgtggatcacgctggcgacgggtaaaactttctacgccacccgcagcaacgtcagcggctatagcgtgagtctgatgggaagcaatttttccaaagctaagctgaattgatcgaaaaggagaacaggatggcacatctggacgatgtcattgccagggtcgatgacaccattgccgggggcgtgattgcctctatgaacgagctactgatcgcgttaagcgacgatgccgaactgggccgcgatgagcgttatacccagcagcagcgcctgcggacagcgatagcccatcacgggcggcaacatcatgaagatcaggaagcacgccgcgagcagttaaccaaaggcggcgagatcctttaaggatgacgtcagaactggcgcctggccaccagccaggcgcccaccaccaacatcaccgccccgcatactggcccgattaacgcccgaaacggcacgccctgggcgcgaatcaaatcaataaccaatccgccaaccaattggctggccaccaataccgcaatggttgtcgccgcgcccacgttttgatagccgctgatgctggcgaagacgaaaaacgaacccagcaggccgggaatcagggtccaccatttgacgttgagcgccagttcctgaaagcctgccgcgccgtggcgcaggagtaagatagtgacaaaaagcacgatccccaccagcgaattgagcaacatggcgataagaatcgtcgaggcggattgggtaatgcggaccatcagggtgttttgcaataccagaccgacgcccgccgctatcaggcaggcaagggtgagcgactgattcatgcctcgccgtccggatcctggcgatcgtcgagctgtagctgcataaaggtcagatccagccagcggccgaatttggttcccacctgcggcatctgtccgctggtgataaaaccaagtgattcatgcagatgtaacgaagcatggttgcgggattcaattccggccaccatcacatgtttgcgcagacgccgcgcctcagagataagcgcgactaacaacttacggccaatccccttgccctggtgatcgggatggacatacaccgaatgttcaacggtatggcggaaaccgtcaaaagcgcgccagtcgccgaacgaggagtacccggtaatgacgccgttttcttcactcaccagcactggatagccggcaatctgccgggcctcaaaccaggcaatacggttatcgatatcgacggttttgtcattccagatggcagcggtatgcagtacggcgtgattatagatttcggcgatcgccgcgcaatcgtctttactggcatggcggatggacatagcaagcctcaaagtctgtacactatagtggtacggtattattacaataatgaacggcaggctgtcatcagttttacgataaattttacgtggaacgtggcaatatcggggatggcggacagttgtgtaatacggtagtgcgcactatattgttacgtcatgaatactatagaagacaatctcaaccagcgcattagcgcacgcattcgtatcgaacgcgagtcccgcggctggtcgctgagcgatctggctgaacgcgcaggggcctcgcgggcaatggtgcataaaattgaacgtggcgaaagtagccccaccgcggcgatgctgggccgactctccggcgcgtttggcatcagtatgtcgacgttaattgcgcgtgcagagatgcaggagggcaagcttttgcgctttgccaaccagccggtgtggcgcgatccacaaagccactatttgcgccgtcacgtctcgccgcgtagcgatctgccgatcgatctggtgcaaatagagctgccggccggcagcgatgtaccgatgcctgcttcttcgtatgcgctggcgcgacagctcatctggctacagcagggtgagttagtttttgtagaagggaacactcgccatcagatgcaggcgggggattgtctggaactggggccgcccaacgattgccggtttattaatgagtccagcgagacttgcgtctatctggtggtgcgcctgaaccaatccggctcataatgttaaagcgcgttaagcataaaacggctagcctcagtacaggccgttaacaagaggagtttgctatgaccgctaatccacaacgccatcaccgctgggtattggcttcacgcccgcacggtgaacctaccgccgaaaatttcagactggaagagggtgacctcccgacgccgggggcgaatcaggtcctgctgcggactatttatttgtcactcgacccttatatgcgtggacggatgagcgatgcgccttcttattcgccgccggtggacattggcgcggtgatggtcggggggacagtaagtcgcgtggtgagcactaatcaccctgattttaaacccggtgagtgggtgcttggctatagcggctggcaggattatgcgctttccgatggtagcgatctggttaagctcggcgacaatcctgagcacccttcgtgggcgctgggggtgttaggcatgccgggatttaccgcttatatggggctgctggatatcggccagccgaaagcgggagaaacgctggtggtggcggcagcaaccgggccggtgggggccaccgtcgggcagatcggcaaacttaagggttgccgtaccgtcggcattgccggcggcgtcgagaagtgtcgttatgcggtagagacgttaggcttcgatgtttgtcttgatcaccgcgctgcggatttcagccagcagctggcgcaggcctgcccacagggcatcgatgtctactatgaaaacgtcggcggtaaagtctttgatgcggtcctgccgttgttgaataccgctgcgcgggttcccgtgtgcggactggttagcggctataacgccaccgcgctgccggatggcccggatcggctgccgctgctgatggcgacgatccttaaaaaacgtattcgtatgcagggctttatcattggccaggattacggccatcgcatcgcggagttccagcagcaaatggggcgctgggtgcaagaaggtaaaatcaaatatcgcgagcagcaggttgatggcctggcgcaggcgccgcaggcgctgattggcctgctgaagggagaaaacttcggcaaagtggtgattaacgtcgcagcggaggagtaacgttaccgccttatctaacgcccccgaagacgcgtgcgggggcggtttcgtcgcctctaagcaaaaaaatgactaatccatacttttattaatggtttgcttttccgtgagcggctttttatccttaaggaaacttaagaggttaatgcgatgaaagatgtagttgataaatgcagtaccaaaggctgcgccattgatgttggcaccattattgataacgaagactgcgtttaccgggtcgagaaacttttctctacccgtgaagaagcggagtctgcggtagcggccattcgcgaacgcgccgttgccgccgccagcgaaacgccgagcgtggattacacgattgagccggtgggtaatgaggcgaaactggacgcggcggtgaatttctcctgccaggcggaaaaaattattttcgaattgtctttaagaagcgcgttctaacagaatgtggcggaataaaaagggatcccaattgggatccctttttttatcattactcattgggtggcgtcatcattcgaaacgccaggcgagattcataccgatgccgaagttacggcccggcgccggttcgtaataacgaccattggattcattaacaatcaccgagccaacgtaggtgcgatcgaacaggttatcgacgcggccgaacagatccatatccattttcccgtagctccacttatagccggtggtcaggctaaccacggtccacgatggcgctttggcggtgttggcgtcgttggccataatgtcgcccatatagcggatatcgctacccgcgtaccagccctgttccggttggtagccgaaagaggcatagcccatattgcgggcaatacccggaatgcgattgccgttgcagtctgaggagccgcaaacgttcgtgcgataggtggcgtcgagccaggtccatgctgcttttaatttccagctgtcgccaaactgctggtcgagaccgagttccactccctgacgacgggttttaccggcgtttttatagctggtgcggccgccgctgctggagtcgaccacaatctcattgtcggtatcggtctggaacagcgcggcggtgaacagtccgttgcctatccgcgttttgctggcgatttccacggtttcatttgtggagggtttaagatcgaagtttaatccgctctgattgccggaacgatacgagagttcattgatcgtcggcgtttcaaaaccgcgtccggcggaaagatagatattccaggcatccgtgacggcatacttcaatgaaccggctggtagccatttgtggtagctggcatcgccgctatcatcgctgttacccggagtgacgtaatagtcgttagagtcaaaccaaacggagctgtagcggacgccagcatcgaatgtgagcttgtccgtcagctgccactgagtctgcaggtagggatcaaggttccacatcagattacgttcattacggcgtaggttgccctgttcgccatattgcggcgcgccgtgcaccagaacgtagttttcataacctttacgccgttcgctcatattttcgtaatcaagaccggtggtaaaggtcaccggcaccagtaattcgccgcggtgggtccagcgggtgtcgatcccctgataatggcgagttaaatcgatgactcccccggaatgcgagggcttcagctgcggcgccatcgggattgattggtactgagtggtttcgcgctcgccggcgtacatcatcacgctcagatcgtcctgctggctaagctggcgctcatagcgtaaaccggcctgggtctgtttcaccgttttacgcgtgttgtattgatcgccgcgcggcgattgctgaggattattacgccattcatcatatgtcaatccgcccgggtcgttcgctttgatatctacgctattgaacagcagcgttaatttactgacgtcgtttatacgcacgcctaatttggcgttggcgagatttttacgcgccccgctatggtcgcgtgaaccgtgggtagtaaaacggttggtcgacaccgtgtaatcgacatcacctgcctgggtgccgtcgccgacggcgccggtggccttcagtccgtaatgccaggtgccgaagctgccgtagtagctgctggcctcgattgtcggcggctggctgccagtttgggtattgacgttaatgacgccgccggaagagttgccatagagcgcggaaaaaggtccgcgtaacacctcgaggctatcgatactgccgatatcgatattcgacgtctggccctggccatcgggcatggtggccgggataccgtcaacgtatagccgcaggccgcggacgccgtaggtggaccgggaaccaaaaccacgaatcgacaactgcaaatcctgagcatagttttgccggttttgtacctgcaaaccgggtaccgcgccgagcgattccgagaggttaattcgcggggcggccagacgcatatcatcgccattcactacgctgacggcggcaggggtatccagttcggaaatcgcggtaggcgtcgccgtaacgaccatggtttgttcgtcgttcgtgctggcgtgcacgttggcgacgagagggagtaataaagcggggagcgcgaccgtgcgcatggcaataatcttcatcaaagcgactcgcaaagagaaacgtaccaaatggaacatatgtatatatgttacaccgtttgtaaattctttgaaaagaattaactaaccggtcgttaagtaatagcaagtgaaggtgattcttttaaccaaaaacaacaattaacgctccacattacgataaataatgattactattctcatttacaaaacgagtgaaggtaaacttcacgctgtggaagccatctctaaccagtaattaattgttctataaagggaatcgttatgtcattacgtcagttatccgcgccgcgtctgcgtcgttctctgttattaacgtcgttactgttggctggcagcttcagcgcccacgccgccgaggagctcttgcgtaaagcggtcggtaaaggcgcgtacgaaatggcgtatagccagcaggaaaatgcgctgtgggttgccacctcgcaaagccgctcgctggataaaggcggtatcgtctatcgtctggatccgactacgctcgacatcacccaggttattcataacgacctgaaaccgttcggcgccaccatcaatcacaccacccagacgttgtggtttggcaacaccgttgatagcagcgtgaccgcaatagatgccaaaaccagcgcggtgaaagggcgactggtgctcgatgaccgtaaacgtagtgataccgtgcgcccgctgcagccgcgtgagctggtagtgaatgagaaaaccaataccgtatatatctccggcctgggtaaagagagcgtcatttgggtggtggatggcgacaagctgacgctgaaagataccattgccaataccggcgcgatggccaccgggctggcaatcgatgccgacgctaaacgtctttacaccaccaatgccgatggcgaactactgactatcgataccgatagcaataagatcctctcgcgcaagaagctgcaggatgatggtaaggagcatttctacctgaacctgagcctggatacagccggtcaccgtgctttcattaccgacagcaagcagccggaagtgctggtggtggatattcgtgacggcaaagtgctgcaaaaaatcgccgcgccggaatccctggcggtactgtttaacccagcacgcaacgaagtctacgtcacccatcgcaaagcgggtgaagtcagcgtgattgatgctaagacttataaggtcgttaaaacctttaaaacgccgactttcccgaatagcctggcgctgtccgccgatggaaaaacgctgtttgttagcgtgaagcaggagtcaactcgtcagaaagaggccaccgcgccggacgacgttatccgcattgccctgtaatctctcaaggagggggagccccctccttactccgggtctcatcctctgttacaaaccgctattagcctgattactataaaggttatacacttactttttcccgcgcgcggcgggagagtggtaatcattctggagaaattatgaaaaagccatatatggtgatctgtgcggcggcaatgctggcgcttctggctggctgcagctctaattacgtcatgacgacaaaaagcgggcaaactatcgtgacccacggtaaaccgcagttagataaagaaaccggcatgaccagctatatcgatgagtctggcaacaaacgcgaaatcaacagcagcgacgttgctcagctggtggaagataattaattttgcggtgacggtttgcccgctgaggggcaaaccgttatggagaggcgcttagcgtttttcaacgcccggcgccgtgctgtgaacatcagccacgcgtttacgtacgccgaaccagccagcgatcagcagcaccgccagcagcggaatggaaccgatggtataggtgccgttcgggtagtcaaaagccatcaacaccagaacgctcagcaagaacaacagcgttagccatgaagtaaatggcgcgcccggcattttaaagctgacatccgccgcttttccttccttgatagccttacgcagacgcatctggcagatcacgataaagccccatgaggcgataatccccaatgatgcgacgttaagtacgatctcaaatacctgcgacggtaccagatagttgaggaagacccccaccacgtagaccgccagcgtcgcgaggatcccggcgtaagggacgtgatgacggctcatctttgacataaacttcggcgctgagccacccatcgacatcgaacgcagaattcgcccggtgcagtacaggcctgagttcaggctggagagggcggcagttaacacgacgatgttcatcacgctgccgatgtacggtacgccgagcttcgagaagaaggtgacaaacgggctttgccctgcctgataggcgttccacggcagcagcagcaccaacagcaccacggaaccgacgtagaacaagccgatacgccagatcacgctgttaatcgctttcggtaccatggtttccgggtctttacattcgcctgccgcggtacccaccaactcgatggaagcgaaggcgaagacgacgccctgaaccagtaccagagccggtaacagaccgtgcgggaagaaaccgccgttgtcggtaatcagatggaagccggtggcattgccatccagcggtttgccggtaccgaggaaaatcgtgccgacaaccaggaacgcgacgatagccagtactttcaccaacgcgaaccagaactccatctcagcgaaccatttcacgccgatcatattcatggtgccgacgatcgccagcgcgccaagggcgaagacccactgcggaacatcgccgaaagcgccccaatagtgcatatacaaggcgacggcggtgatatcgacgataccggtcattgcccagttgacgaaatacatccagccggcaacgtaggcggctttttcaccgagaaattcgcgagcgtaagagacgaaactaccgctggaggggcgatggagaaccagttcgccgagggcgcgaaggatgaagaaggagaagataccgcaaaccagataaaccagcgccagcgccgggcctgccatttgtaaacgcgccccggcgccgagaaacagaccggtcccgatggcgccgccaatggcgatcatctgtacctgacggttgcccattgctttgtggtaacccgattcgtgcgagttgagccagtggcgtttcgcggcatgatgttccgccgcgtcagtgtgtttgttattcattgatgtacccattttcctgtcaatgtccatgagtggttgtcgtatcgcgcagcggcgatacatcgtgctggctttctcactattctgtcgtagagataaatcatgcacggcgctgcatcctacacgtaacgtgatagtgacgcacgtaaaacatttcacaacagcacttacttaaatatcaatgagttcaatgacgcaacgcgtcgacgagtagcgcaaacgcagcggtatgctgacgacggctgggataatacagatgataaccagggaaggtgggtgtccaggcatcgagtacccgtactaaacgaccggcaaccagcgcctcctcgacgcaatcatccggcacataggccaggccgagaccagattcagcggcatcaatgcgttgcggtaagctattcagcgtcagttgaccctctacataaacctgaaagcctttaccatcgtcggtgaattcccaggcgtaaatcccgccgcgggttggtagccgcatattaatacagcggtgctgatccagttgataaggcgtctgcggggtgccgtagcgttgtagatagtcgggcgagcccacgacgaccatgcgcatgtccggggcgatgcgtaccgcaatcatatcctttgccacctgatcgccgagacgaacgccggcgtcaaaacggccatcgacgatatcggccaggccgttatcgacggtaatttcgatattgatatccggataacgcaacataaatggctttaatgccggccacaacaccgcgctgacggcgtgttcaccggcgttaaggcgaatattacccgccggaagggcgcggctatccctcaaggcgccgagctcgcgttcaatttccgtgagatgcggacgtaaattctggaacaatttttcacccgcttcggtgggggcgacgctgcgggtggtacgggtcagcagacgaacatcaagccgggcttcgaggttgcgcatcgcatggctcagcgcagattgcgataccccaagttgggcagcggcgcgggtgaaactgcgttcgcgggcgactaccataaacgacaggagatcgttgaagttatcctttaacatgctgttaccgtatttaatttagcgaattcatggcaggaaattgagtctaaacgcggtagacggctttcgccacaaggatctacgcagctgaagagagtatatgctgactatcgggagaaaaaggggcttgaaatcatcatgaaaatcaatgtggtaggcactagcggcgtagggaagtcgacacttgcgcaacgcctggcggcagcgctttctttgccctacatcgaactggataggctctactggcggccagagtgggagggggcgccggatgaagagtttttcgccagcatcgcgcaggccacggcctctgctggctgggttcttgatggcaactataatcgcagtcgcgcagtcaaatggcgtgatattgatctggtggtatgggtagattatagctttgttcgcacactatatcaggccattcgccgtgcgctgagtcgcgcctggcaccagcaggagctatggccgggtaccggtaatcgcgaaacctttcgtcgcaccttctgcaatcgtgattcgataattttgtggaccatgaaaacgtggcgctctaatcgtcagcgctatttagcggatatgcattctgcgcagtatggtcatatccgtttcgtccgtttacgtaatcagcgacaaacagagcgctttattgctgaaattgtccatcagcaggcaatggctggcagggtgcatatctaatttccggcagagtacatgtgaataaattgtttctcagtacgcgctgcagattctaataatgcaggcatgttaattaaaacgagcctgcgaaatgtcttatcgaatcagtatcctggataaaagcccccttgctcccggtgaaacggccgctcaggcgctggcgcgtacgttaacgcttgcgcaacaggcagaacgctggggatatcatcgtttctggattgccgagcatcacaacgcggaacagctggcgagcccgtcgccggagctattgattgcctggatcctcgggcaaaccaggcagatccgcgtcggctccggcggcgtgatgctgcagcactatagcccctacaaagtcgccgagaattttaatctgctggcaagccttgccccagggcgtgtcgatctcggcgttggcaaagcgccaggcggtttgccgcttgccactcgcgcattacagcagggcattcatcagcacgaaaagggcagttttgctgagcaacttacccagcttgataactggctaacgttgaccgaaaaccagggcgaggagagcctgcgcgcgacccccattccaccgcgccgtgcggacggtttcctgctcggcgccagcgtcgacagcgcccgtctggcggccagtctggactggaactttgtttttgccgcgcatctcaatggcgataaaaacttgttgcaggaggtgctgacgaactggcgcgaattgagccgccgcgaggtgatcgtggccgtacaggttatcgttgcgcaagacgccgccagcgcggccgatctggcgaagcaggtagaggtctggggcgtcgagctggcaaacggtcagcgggtgacggtgggtagtgaatctcaggcggcagcttttgcccgtcaggcaggtagcccgccgacgcgcattgagcgccgcgagtcctcgctgttgttcggtaccgcagaagaggttaaagcacaactcgatgcccttcaggcgcagtggggcattgatgagtttattattgatacccctattgccgaagggcgtgcgcggctggcgtcgttgggattgctggcgcaggcgcatcttggcgcggaggtaacgccatgaatttcgagcaacagttgattagctggcggcgcgaactgcatcagaatccggaactctcattacaggaagtggcaaccaccgcgcgtatccgcgactggttgcaaagcggcggcctgccgttactgccttacgagttaaccaccggcgcggtgacggaagtgggcagcggcgataaaatcatcgccctgcgcgccgatattgacgcgctaccgatagaagaggccaccggactgccgtaccgctcgcaaaatcccggcgtcatgcatgcctgcggtcacgatatacataccagcgtgatgcttggcgcggcgttgctgttaaaggaacgagaagcgcaactgccggggcgggtgcggatcctgttccagccagcggaagagagtttcggcggcgcaaaaacgttgatccgcgccggggcgcttgacggcgtatcggcaatcttcggcatgcacaatgagcccaatttacccgttggcgagtttgccacccgcggcggcccgttttatgccaacgtcgatcgcttcgtattcaaagtaaccggcaagggggcgcatgccgcccggccgcatgaaggcaaagatgccatcctgctagcgagccaactggtgacgctgctacagagcgtcgccagccgcgaagtgaataccctggattcggtggtgctcagcgtgacgcggatccaggggggaaatacctggaacgtcttgccggaaagcgtagagctcgagggaacgctgcgcacccacagtagcgaggtgcagcagcgggttaaggcgagagtcagcgaaatcgccgccggcttcgccagcgccttcggcgcgcaaatcgatgtcttctggtacgccgggccaacggcgctggtcaacgatgaacaatgggcggcgttcgccagcgcggcggccgaccgcttcggctaccgcacgcatcacgccgatttgcatctgggcggcgaagactttgccgtctatctgcagcatattccgggtgctttcgtcagcatagggagcgccagtgaattcggcctgcatcatccggcctttaatccggatgaaaacgtcattgccccagccgcgcgctatttcgcggatctggcggaacaggcattacaccatatttaatttttgacagggtaaggggtcactatgtctgaaaaacggcaattacgtctggggacgattttacatggcgcctcaggaaatatgtccgcctggcgtcatccggcggcgctggcggatgccagtattaattttgaatttgtgaaagaaacggcgcaaaaagccgagcaggggaaactcgattttatttttgtcgccgacgggttatatattaacgaaaaatccatcccgcactttttaaatcgttttgagccgttaacggtattatcaacgctggcggcggtgaccgatcgtctggggctggtcggcacgctctccacctcctatagcgaaccgttcacgaccgcgcgacagttcgccagccttgaccatttaagccacgggcgcgctggctggaacgtggtgacgtcgccgctggaaggctcggcgaaaaacttctctcgcgcccagcatcccgatcatgcgctgcgctatcgcatcgccgacgaatatcttcaggtggttaaaggattatgggattcctgggaagacggcgcttttgtgcgtaataaagagagcggtcagttttttgataaaaataaactgcatacgcttaatcatcatggcgatttctttaaagtcgctggtcctttgaatattgcccgcacgccgcagggacggcccattattttccaggccggcgcctccgatgacggcaaaaaattagccgctcgccacgccgatgccatttttacccaccaggaatcgttagccgaggcgcaggcgttttatcaggatgtcaaaagccaactggctgcctatcagcgcagtgcggatcaactgcatattttccagggcgtcagcgtaatcgtcggtgacgacgcggaggatgcggagcgtcaataccagaccacggcggcgctggtctcgatcgacgacgcgttgaattacctgggtcgttacttcgagcatcatgattttgcgcaatatccactggatgaacccttcccggatattggcgaccttgggcaaaacagcttccgcagcaccaccgatgagattaaacgcaatgcccgtgaacggggattaaccctgcgccaggtggcgctggaggccgccagcccacgcccgcgcttctccggcacggccagcgacgtcgccgacggcttacagctgtggttcgagcaacgcgccgccgatggcttcattattcagggcggcacgccggaaaccttcccgcgtttcgttgatgaagtggtgccattgctgcaggcgcgcggattgctccgccgcgactatccaggcaccacgctgcgggaaagcctggggctggatctgcccattaaccaattcgaaaaataataaaagagaaccgcgctatgcagaaatcaacgctattgctggccttcgcgttggcaattagcgccccgtcgtgggcgcaggacgtcaatatcaatggcaccggagttagcctggaagccaataaaaccccgattcatacggcaaaaaatccgcaggcaattgcgctgttgccgaaagatctgcacctggcggtgccggggaaatttaccgtcgcggttgcggcgctaaactcgccgccgctgacggtgttttctgatgataacaaaacgttgctcggtagcgaggcggatattgcgcgtctggtggctgacagcctcggcctcgaagtcaacgttgttccgacctcgtgggaagactggccgcttggcgtcgcctccggcaaatatgatgccgcgatcagcaatattaccgtcaccaaagagcgcaaagagaagttcgatttcgccacttatcgtaaagattcgctgggtttttacgttaaaagcaccagcccactgaacaagatcgacaaagcggaagatattgccgggctgaagattatcgtcggctccggcaccaatcaggaggcaatcttactcgcatggaatgcggaaaacgttaagcgcgggcttaaaccgtttataccggtctacaccaaggatgacgccgcacagacgctggctctgcaaacgggccgcgccgatgcttactttggccctaacgtcataggcgcctggaaagcggcccttactggcaaaaccaagctggtgggcagcgtggacggcggctggccgaaggcggcgcatatcgcggtgacgctgaagaaaggcagcgggctggtcaatgccgtccaggcggcgctgaatggcgctatcgccagcggcgattatgccaaagtgctcaatcgctggggcgaaggcgtggagagcattccacaatcggaaattaaccccgccgggctgggcgattaacaggaggcgctatgagcgaagcattccgtgatatttctccggacgcgccggagctacagccgattattagcggcctgtttgccgagtacgccacccgttacggcgactatttttctcgtgatgcggaagtggagttaaccgaatggtatctgccgccgcaggggctgtttattgtgctggagcgtgacggcgaaatcatcgccaccggcgcttacaagccgaaagatccgcacaccgcggaaattaagcggatctggacgcatcgtcggctgcgtcaacaggggctggcagccagggttgtacaggaactcgagcgccgggcggtgctggcaggttatagccatatttatctcaccaccggttttcgccagccggaagcggtaaagctctatttaagccaggggtacgaagcacagtttgacctcactcgcgacccggaagagtacagccgcccgccctatgatgggcggttgcggttcactaaagcgctggcggttagcgccctcagccacagcgcttaaggaggcgtcatgcaatcatctgaaacgattaaagtggttccggctcgctatccgctgcgcgtcgccggggcggtattggccctgctggtgctggcggtcgtcgtgcagtcggtcgcgttcaatccgcgctgggagtggggggtgttcgcacactggttcttcgacccggtgatccttgaggggttggggcaaacgctgctgcttacactacttggtacctttttaagcgtcatcttcggcggcctgttggcgctggcccgcttgtcgtcgtcgtggctgctcagcagccttgcatgggggtatatctggctgtttcgttcgctgccgctaatcgtggtgttgatcattctgtacaacttttcatatctctacgacagcttatcgttggggatccccttcaccggcataacctgggcgagctaccagactatcaatgtactggggcagttctccacggcagtagttggcctgacgctggtgcagagcgcctatactgccgaaattatccgcggaggctttttgggcgtggatcacgggcagtatgaggccgccgccgcgctgggactccccgcctggcgacgtacgctgcggatcattttgccgcaagcgctgcgcaccattctgcctgcggggttcaatgaaatcattagcctggcaaaagggacggcgatggtttacgtgctggcgatgccggaattgttctacaccattcagatgatctataaccgcacccaggaagtgatcccgttactgatggtgggcgccgcgtggtacctggtgattaccagcgtgctttctgcaattcagtacctggtcgaacgcgcgctggcgcgcagcgaacggcgctcagcggtgaacagcgtgcgtaataatcgcgttaaccaaccggctcgtcagccgcaggaggccgtccatgctcaactctcgtaatggtcatatttcgataaccggggtcagtaaatactttggtcgtcataaagcgctggatgatgtctccctggagattgcgccgggaacggtgacggtgatcctggggccgtccggttcgggaaaatcgacgctgctgcgcaccattaaccatcttgaacgggtcgatgaagggtttatccagattgatggcgactatatcggttatcgccgtcaaggcgacaagctgtatgagctgaaagaaaaagagatcctccgccagcgggttaacgtgggctatgtatttcagaacttcaatttgttcccgcatctgacggtgctggagaatctgattgaagcgccgattgcccataaacaggccagtcgcaaagaggcgattgctcgtgcgtatgaattgttggacattgtcggtttgcgcaacaaagccgatgcctggtcacggcatctttccggcggtcagcagcagcgcatcgccatcgcccgcgcgctggcgctcaatccgcgcgtgatcttgtttgatgaacctacctcggcgctggatccggaactggttggcgaagtgcttgatgtgatcaaaaaacttgcccgctccgggacgacgcttgtggtggtaacgcatgaaatcggctttgcccgtgaggttgccgaccaggtggtgtttatggtcgatggcaaaatcgttgaacagggcagcagcgatgaagtgttaaataatccgcaacaccagcgcacccggcaatttttatcgcgggtgctggcatgaggaaattagctgccgctctcatgctgctcctgagcatcggcgaggcgcgcgccgaacttgatttgcgcgccaatgaacggccattgccggtgacgcgagatgataacgcgattagcaaaatcccgcctaactatcgttttgtggagcccggcgtgctgacggtggcgatttcggcgttaaattcgccgccgctggcgctgctggccagcgacaaccgtacgcgcatcggcagcgacccggacattgcccgtttactggcgggtagccttgggctgaaactgaagttggtgcctacggcctgggaggactggcctttggggatcgcgtcagggcgttatgatgtggcgttgattaacattgcggtgaccgagaagcgcaaagagaagttcgatttcgccacctaccgcgttgactcgctggccttttcggtgaaatcaaccagtgagatcacgcggatttcaaatgcgcaggatctctcggggcgtaaagtcattgtcggttctggcaccaaccaggagcggatcctgctggggtggaatgcggaaaacgaagccgccggccgtcagccggcgttaccggtttatcttactgacgatgcctccggcaatttgtatattcagtcgggaagggcggatatcttttttggcccgcagtcggtggcctcttataaggctgcattaaacgggaaaactaaagtcgtcgggctgggacccaaaaaagcctgggtggcgacgactactaaaaaaggcaatgggctggtatatgcgctgcaggcggcgctaaacggcgcgatcgctcgcggcgagtatcagcaggtgctcgcgcgctggggggaacagggggaggaagtcaggcaatcggaggtcaatccgccggggataacctattgatgcaatgattattcatagcagggattgctatactcatggctacatcgtgtgtctttttaatggattaatcactgtggctgaaaaccaactcttactggagcaacgctggctgcaccatcgtgaacccgcgttgctcgccgcttccggcggcgctatcgacaccatcagcttcatcaccttgtttggcctgtttaccgcccacgtcactggaaacctggtggtggccggtgcagcactggccaccaacagcgaaggtattttatccaaactgctcgccattcctgtttttatgctggcagtggcgctcgttacgctggttatcaaacgtcgaaaaattatcacgccacgcttccttggcggcttgttcgtcgtcgagatcctgctgttactgcttttcggcctgttggggctgctgtggcagccctttgtcggcgcggatagcgcgaccgcgttaatcaccggcatggcaggcgtaatggcgatgggggtgaggaatgcaaccacccgtttattattacccaccaccagcccgagtacgatgatgaccggcaacgtcacgcagttaaccatcgatgtggtgaactggtgccaggcgcctaaccgcgagaatagagagaaaatcaaaaaatcgggggcttcggtgctcggttttctgctgggcgcagggctcggagcgctgggctacatcctggcgggcttttactcggtacttattccggtggtactggtggccatcgtcgcctggcgcgaattcagcgccgcgcggaattagtgctacgctaaaagttttctacgcgggagctgacgatgatgaaattgtatggcgtgccggggtggggctcggcgataagcgagatgatgctaacgttggccaatatcccttatcactttatcaatgtcgatggctttgaccagccaggcgcgcagcgagagaaactgttggcgatcaacccgctgtgtcaggtgcccactttgctgctggctgatggcagcgtaatgacggagtcggcggcgatagcgctgatgatcctcgacgagcgcccggatctggcgccgccagccggtacgccacagcgccggcagtttcaacgtttgctgatctggctggtggctaacgtttatcctaccttcacctatgccgactatcccgaacgttggacagcctcagcgcctgacgaactgcgtgagagctgtcagcaataccgcaaatcactgtatctatggctggaacaacagctggctgccgcgccttacgccttgggcggggatatcacgctgttggattgctatattgccgcgatgtacagttgggggccgcgccgagagtggttcgcggcgcatacgccaaagtttgccgccgtggcgcaggcggtttatcgccgtacggagctgcagcaggtactgcatgacaacaatcttctttaaagcactaattgtgacttgcatcaggaaacctgtgatagttttaaattcccaagaataaggagcctgctatgccacatgtcgatattaaatgttttccccgtgaactgagcgaagagcaaaaaaatgcgctggctgcggaaatcactgaagttctgatccgccatcttagtacaaaagacagttcagttagcgttgcgctcaatcaggtgcagcagagcgactggcagcaggtatgggataatgaaatcgcgccgcagatggattctttgattaagaaaccgggataccgaatgtaaaagaccggccgccgttagcgcattttcgtcacgctaaatagactaccatcggccgaggtcaattttacttgagcgaaagatatgccactttattgatccagatcaataaaagtggcttttttttgatttccatacctttcattaatttaccttttgtaaagtaattggccatttaagaataatcctaatcaacataaataactgataatactgcactatatagtgcattgcgctttatatgtatttaaatgtagttttatgttttgattattatgcatatcaaaattgtttaggcgattgctgatttgccatgtaacctgcctttgaaatgatgatttttatcatggagagatgaatgataataggtagtgcgttacttggttaccaattagaggatgattttttttacttcttgaagtaccgggaaatagctactgtaagtggtaatagaaaaaacatccgtctacgaaaaacgatggcctgtttaattgagtatttatttgaacatggtcttgaaagaatggttagtgatgaagagttgatggtacatgtctgggagaaaaatgatttaaggccctcatcacaacgtttatggcaagtgatgcaaaatttacgtcggatcctgaaggatatcggcatcgaacaagagattatattacgcgttaagactcagggttattatatcaatagtcattacgttacgagtgtttattcggtaagaactcataaaccattctgccagaataatgatgcgaccgttcagctttgtgagctgtccgagctaaattaatagccatagggtctgccgtattcaaggtatgcctgtcgttttcatgttaaggttataaaattgaaggtgataattaatagtaaggatatttggttccgactgggcgtggaacactgtctgcaacagatagcttctgacgataatgagatcgattacgctgatttggatttttgtaatcattctatacagcaagcggatctcattatattgccgttacatggctatcaagattacaagcatatttatgcgctatctcaattttatcagggcatgattctgggtgtgagcacctccagaaacgttcactcacggcggcttttatttcgccaaaatatattatggataagcagtcgtgaaaccatagacaatgttcaaaaattattgttaacgatcaagcatcggcaattatatcatcatgatggtcaaccggattttagtgtaatgaaggcaaaagatggggctccgctcagcgaaagagaaatgatgattattgatcatgtcgccaaaggcactccggtgaacgccattgccagagcgttgggactgcgggtaaaaaccatttatgcgcatttagataaaattaaagctaacttcaaccttaaaggtggaagtcactttcatcgcttcatgataagcccgccgtcttatcacttactctaaaagatggtgaaagggaatgacggcagagttgccgtcgttctgttaattatgtggcgtattcgcctgcacgtgacggccgctggcgacaaaattgccggtaccgagatggtgaatagtattgagtttgtcatcatcaaactgccagcgcccgctgacgaaggctcgttcatcggccgcggcggcaaccacttcgccaaacagcgtatcgtattgctcttgtgccgcggtggcgggtagcagacggcattccatccacgccaggcatttctcttcaattaacggtagccccagttcgggcccattcaccaccgggataccgtaagcattgaacttatcttcatcacgcccgctcacgctgccgaccgcatagacccaactggcggcggccacgcccggcaccacaatgccaaaggcgccgttacgctcaatgatctcccgcgtccaggtgcttttatccaccacaatagccactcgcggcggggcaaattcaaccggcatcgaccaggcggcggacatcacgttacgccgtcctgactgcgcatcataactggtgatcataatggtcgggccgtggttgagcaggcggctggcgtactgaagttccacgtggcgaaaacggctcataagcgttccttggtgagtgggcgaatgcctgtaagtagtttattcacaatacaaaggtaatcaatacatcaacggctatgtaaatcagatatcagctggcgcgatcgcacaaaatacaccgtcgcggggaaaaaataggctataaatgtcggacaccaaaagctggaggcgttgatgaccccatttttaagcgcgtattttactcgtctggcctggacgggaacccccgatgtttccattgacaccctgcgggagttgcatagccatcataatagcgcgatcccgtttgaaaacctggacgttctgctaccgcgtgaaatccaccttgacgatcgggcgctggaggaaaagttaatcaccgcccgccgcggcggctactgctttgaacagaacgggctgttgcagcgggcgctaagcgagatcggtttctcggttcgcagcctgttgggccgcgtggtgctggcgaatccgccgcagatgccgccgcgcacccatcgcttgctgctggtggaggtcgaaggcgaacgctggattgctgatgtcggctttggggggcaaaccctgaccgcgccgattaagctgctggccgatattccgcagcatacgccgcatggtgtttaccgcctggtgcatgaaggcgatgagtggacgctgcagtttaatcatcatgaacactggcagtcgatgtaccatttcgatctggggcgacaatatgcctctgattatgtgatgggtaacttctggtcggcgcactggccgcagtcccatttccgccatcatctgctgatgtgtcgtcatctgccggacggcggaaaaatgacgctcaccaatttccattttacccactgggaaaataaccatgtagtggagaaggtggatcttgcggacgtgtcggcgctttatgaaacgctgcaaacccgcttcggacttggtgtagatgacccgaagcacggcttcagcgaagccgcgctggcagcagtgatggcggcgttcgatacccatccggaagccgggaagtaacgctgatgacgacggcgaagaaagcgcagtttcgccgttgtaggccggataaggcgtagccgccatccggcataaaggctggagccggggctgatgaatatgacccggagtcggcgcaggcgcctcgtccgggctattggtaaacgggcatggctggggccgccagcgctcagcgccgggagcgcaccacctggtagcggcgggtgaaatactctatcggcgcgctccagacgtgaaccagccgggtgaacgggaagataaggaagatagtcattcccagcaccagatggacgcgatacacccacgcgacgccgtccagatgcgccgatgcgccgccgtggaaggtgactaccgcctgcgcccaatccaccagtttcagcatttcgctgccgtccggatgctgggcggagaacgggatggtcgtcagccccagcgcgcactgaatcagcagaatgcacaggatcaggatatccgcagtggtggaggtggcgcgaatgcgcgggttggtcaggcggcgcgccagcaggccaataccgccgaccagagtcagtacgccgcagacaccgcccagcaccatcgccattacctgtttctgcgacatcggcaggaaccatgaatagacccagtgcggcgtcagcatcccgaagaagtggccgaagaaaatgccgaggatgccgatatggaataagttcgaccacagcaccatgccccgtttatcgagcatctggctggatgacgcgcgccaggtatactgcccgtagtcatagcgcagccaactgcccaccaggaacacggtgccgcagagataagggtagatatcgtaaaagaagacgtttaagtactgtatcatttcgggcctccggcgcggatgtcgacgtactgcggcgccacatcctggctaaagcgtcgttgataagcttgcattggcgagctatcgcaagcggttgcattatcttcaataaacttcacctgttcctcttcccacaccgcatccagcgcctggcgggtgtcgtcacgcttctcactcgctacctgcttggtgacactgtcactattaagtgggctatccgccagcgcaagaagggtgtcaaagagttgatagtaatcgcattcgcgctgctttaagcgtccaccgagcaacgccagaataggcgcgacgttctgcagtccttcacgggcatcggctaatgggagaatgctgaggtattcaagatataaaggcaggtggtccggcagttcgcgacaatcgatctgcaggcccgcctgttcatactggttcatcagatcgaccatcgcctggccgcgatcgcgtgattcggcgtgaacgtgttcaaacagcaacagcgaggtggcgcgaccgcgttcaaatacctcacaccattcggcctggcggtcgagcagcggcgccgccagtaatcgcctaacaaacggcgtcagggcaggcgcatcggcgctgaccagcgccagcgcctcctcgcggttatcccacagcgcgtcgtcgggatactccagcaacagagcaatgactttgaggatccgcattactctccctccccatgtcgacgaacgtccccgacgtcaatagcgtcgatgcgacgactgttgaacaggttgaatttagtatcagaaccatggcaaccatcgccgaaggtaaaaccgcagccgttgcgttccgggaaggcgtcctccgccaattcgcggtggctggtggggatcacgaagcggtcttcataattggcgatcgccaggtagcgatacatctcttccacctgttcgacgctgaggcccacttcttcaatcgcacgggtatcggtcacgccttcgacggtttgcgaacgtttgtaatggcgcatcgccatcatgcgttttaacgcgcgcaagaccgggccggtatcaccggcgctcagcaggttcgccagatactgtaccggtatacgcaggctttctaccgccggcaggatgttaccgttactcggcaggccgccagcgtcggcgaccgactgaatcggcgacagcggcggcacgtaccagaccatcggtaaggtgcggtattccgggtgcagaggtaacgccagtttccagtccatcgccagtttatacaccggtgatttctgcgcggcgtcgatcacgttatgtggaataccctgtttcaacgcctcttcgatgaccgccggatcgttggggttgaggaacacatcacactggcgctcgtagaggtcggtttcatgttcagtgctggccgcttcttcgatacggtccgcgtcgtacagcagcacgccaaggtagcggatgcggccaacgcaggtttctgaacagactgtcggttgcccggactcaatacgcggatagcagaagatgcatttttccgatttgccgctcttccagttaaagtagatttttttgtacggacaaccgctgatgcacatccgccagccgcggcatttatcctggtcgatcagcacgataccgtcttcttcacgcttatagatggcgccgcttgggcaggtagccacgcagctcggattgaggcaatgttcgcaaagacgcggcagatacatcatgaaggtgttttcaaactggccgtacatctctttttgcatcgcttcgaagttacggtctttggcgcgtttttcaaactcgccgccgagcagttcctcccagtttggcccccaggtgatcttatccatccgttcgccgctaatcagcgaacgcgggcgggcggtaggcaagtatttgccctccggcgcgttgtgcaggtgctgataatcgtaggtaaagggttcgtaataatcgtcaatctgcggcagcaccgggttggcgaaaatcttcgacaacacgctgacgcggttgcccaggcgcggagtgagcttgccgctgataccgcggatccagccgccttgccactcgtcctgatcttcccagtttttggggtaaccgataccaggcttggtttccacgttgttgaaccatgcatattccatcccttcgcggctgctccagacgtttttacaggtgacggagcaggtatggcatccgatgcatttatccagattcagcaccattccgacttgtgaacgtattttcatttcttcgcctcctgtacctggtcacgaccttcgccatccagccagtcaatatttttcattttgcggatcataatgaactcgtcgcggttggagccgacggtgccgtagtagttaaagccgtaagccagttgggcatagccgccaatcatatgcgtgggtttaggacagacgcgggtcacggagttgtggatgccgccccggcgaccggtcacctccgaacctggaatgttcataatgcgttcctgagcgtgatacatcatggtcatgcccggcggcacgcgctggctcaccaccgcacgcgcggtgagggcgccgttggcgttgaaggcttcgatccagtcgttatcttcaatccccagttcttttgcgtcggtttcgcttagccagacgatgggcccgccgcgcgacaacgtcagcatcagcaggttttcgctataggtcgagtggataccccatttctgatgcggggtcaggaagttcagcgctttttccgggaagccgtttggcggcacttccttcatctggctgacgctgcgcgtatcgatcggtgggcgataggccaccagactctcgccgaaggcgcgcatccagggatgatcctgatacagctgttgccgcccggagagggtacgccacgggatcagttcgtgaacgttggtataaccggcattataggagacatgttcgctttccagaccagaccacgttgggctggagatgatcttgcgcggctgcgcctgaatatcgcggaagcggattttctcatcctctttattcagcgccagatgagtgtggtcgcggccggtaaattctcccagcgcttgccaggctttcaccgccacctggccgttggtttccggcgccaggcttaagatgacttcactggcgtcgatagcgctgtcgatacgcggacggcctttggccggaccgtctggcttgacgtagttaagtttgccgaggaagtcgacctcgctttgcgtattccacgaaatgcctttaccgccgttgccgagcttatcgagtaacggccccagcgaggtgaagcgttcccaggtggccgggtagtcacgttcaaccagcgcaattgacggcgcggttttgcctggaatgagatcgcattcgcccttgcgccagtcgaggacatcgaacggctgtgacagctccgccggagagtcatgctgcagcggtaccagtaccacatcggtctctttatcaaggtggccgacgcacacttcagagaaacttttggcgatgtccttgtagatttcccagtcgcttttcgcctcccaggccgggtcgacggcggcggaaagggggtggataaacgggtgcatgtcggaggtgttcatatcgtctttttcataccaggtggcggtcggcaggacgatatcggagaacaggcaggtactggacatgcgaaaatcgagggtcaccagtagatcgagtttgccctcaatcgccgcggtctgccactcgacttcctccggcttcacgtcagcggtggagccaaactcctcgccctgaataccgttatcggtaccgagcaggtacttgagcatgtactcatggcccttaccggacgaacccagcaggttcgaacgccagataaacaggttgcgcgggtggttgttgccgctatccggctgctcggcggcaaagcgaatatcgcctgcttttaacgactggacggtgaaatcggccggtgacagcccggcggcctcggcctgctgcctgatgctcagcggattaacgttaagctgcggcgcggagggcagccagcccatgcgttcggcgcgaacgttgaagtcgatcatatggccgctgaatttgctggcgtcggccagcggcgacagcagctcctgagcggtcagtttttcatagcgccactggctggcgtggttgtagaaataagaggtactgttcatctgccgcggcggacgagtccagtccagcgcgaacgccagcggtagccagccggtctgcgggcgcagtttctcctggccgacatagtgcgaccagccaccgccgctctggccgacgcagccgcagaacaccagcatgttgatcatcccgcggtagttcatatccatgtggtaccagtggttcacaccggcgccgaggataatcatcgaacggccatgggttttatgcgccgtatcggcgaactcgcgggcgatttgttcgatatgttgacgcggcacgccggtgatctgctcggcccatgccggggtataggctttgacatccgcgaagtcgcgcgcggcattggcatcgtcaagaccgcgatccagaccgtagttagccagcaccaggtcatacacgctcaccaccaaagcgctctcaccattggccaacggtagctgtttagctggcagctgatgaagcgttaccggctcctgcttcacgctgcggaaatgcgggttttcgttgccgccgaagtaggggaaaccgaccgacaccacgctatcgtgcatatccagcagcgacaattttaattcgacgtcccggccgttagcctgttgttcgagattccatttgcctttttcgccccaacgaaagccgatggatccgttcggcgcgaccagctcgccttcggcgttataggcgacggttttccattccgggttattactttctcccagcccgtcaagcaggtcggcggcgcgcagcatacggccaggcgcatagctgccgtcgtcacgacggtcgagcattaccagcatcggcatatcggtataggtacggcagtagttgagaaagtaatcgcttgggttatcgaggtggaaggttttgaggatcacgtggcccatcgccatcgccagcgcgctgtcggtaccttgcttcggcgccagccactggtcgcagagcttggcgacttccgaataatccggagtaatggcgatggttttggtgcccttgtagcgcacttcggtgaagaagtgcgcgtccggggttcgggtctgcgggacgtttgaaccccaggcaataatgtagctggagttataccagtcggcggattccggcacgtcggtctgttcgccccaggtcatcggtgaggcggggggtaaatcgcagtaccagtcataaaagctcaggcaggtgccgccgatcaacgataaatagcgggtacccgcggcgtaggaaaccatcgacatcgccgggatcggcgaaaagcccgcgacgcgatccggaccgtagtttttgatggtccagacgttggctgcggcgatcagttgatttaactctttccaactggagcgaacaaaaccgcctttaccgcggatttgtttgtagctgcgggttttcagcgggtcctgcatgatgctatcccaggcctgtaccgggtcgggatgttgtgcaagggcttcgcgccacagctcaatcagccgtttgcgcgccagcgggtacttcaggcggttggcgctgtagagataccaggagtagctggcgccgcgcggacagccgcgcggttcgtgatttggcaggtccggtcgggtgcgcggataatcggtctgctgggtttcccaggtgaccagaccgtttttgacataaattttccagctacaggagccggtacagttcacaccgtgcgtggagcggacaattttgtcgaactgccagcgttgccggtagctatcttcccagtcacggttattgtcgtagacctgaccgtggccgttggcaaaggtctcgcgtttctgcttaaagtagcgaaagcgatccagtaatttactcatgacattcctcctgctccgctaatgtccggcatcgtgccatccggtaaataggtcgttatggttgtgctggtttacggcggccatagaccagccaggtcaccagcacgcaaaccacatagaagacaaaaaagactttcatcgcgcccaccggcgagccggtcatggccagcgaggtaccgaaggcttttggaataaagaagccgccgatggcgccaattgcagcgatgaaaccgagcgcggcggcggtatcggtcaccgcttcatgctgggcctgttcgtcgctgccgccgcgctttttcacgctatcaatggtgagctggcggaagatcacggcgatcatctggaaggtggaaccgctgccaagcccggcggttaagaacaggcccataaacaccacgtagaaggcgaagaagctgccggaaccggagcccggcagggtgaggaaaagcagcccggtaaagaccgccatcagaatgaagttgaccagcgtcacccgtacgccgcccagacggtcggaaatgataccgccgaaggagcgcgccagcgcgccgataaacgggccgaagaaggccagtttcaggatatcgacatccggaaactgggttttcgccagcatcgcgaagccggcggaaaagccaataaacgagccgaaggtggccagatacaacagacttagcagccacatatgcgggcgtttcaacaccggtagttgatcgcgaattgaagctttggaactggcaatatcgttcatgccaaaccacgcgaaaacggtggcgataaccagtaacggcacccacagcagcggtgagttgccaagccacagcatggcgccgccaggttgctctacgccgcgaacgcccagaaaggtaaaaatcggcaggaagacaaaaataggagagaccagttgcatcacgctgaccccgagattgccgagcccgccgttaatccctaatgcgctgccttgtttggccttggggaagaagaagctgatgttgcccatactggaggcgaagttggcgccggcaaaaccgcagagtaacgaaattgcgataaatacccagtacggggtagttggattttgtactgccaaacccagccataaacagggaatcaccagaataaccgtgctaataaccgtccagtagcgcccacccataataggtaccataaaggagtagggtacgcgtaatattgcgccggaaagcgaaggtagcgccgttaataaaaaaagctggtcagtagtgaaattaaaacccactttattgaggttgaccgcaactgcgctaaataacatccagacgcagaaggcgagtaacagacaaaatacggaaatccataagttcctgcgcgcaatcgcttttcctttattttcccagaaggcttcattttctggtcgccaatcttttaaaagataatgattctttttatcaccttctatcgacataacaccctcactaaagcgtacgagatcaaaaggataaataaaaaacagctgaaactatgcaggctggaattaagcttcagctgtttttaataattgtattgtttgaggatagataagaatcgaggcgtgaaagaattcacgccgacaatgaagggcggtcaattgttactaaatgtaacctaagcctgagggagttctagcgcgatataatgttttaagtaacggataaatgccgcgtcgtcaatcgcttgcatccccaacgcgtaaatgccgtccagcccgcaaaccagggcaatcagacgccaggcgatattttctgccgtatcctgcggctgaaattcaccggcttcggcgccgcggttaatcgccgtgaccgtttcatcatgccacatgctcatggtaagcagatatgcggccttaatttcctcatcgctatcggacaaaatctgcgcttcccgccacaggcggatatagggttcgagacggccatcttcgctgccaagtaatgaaaacaggcgttcgctccaggaggcgtcatcggtcagcagctgaatatcgagcatttcgcggatcaaacggataaaggcctgagcttttagctcgccggtcgaggcaaaatgatgatgtaactgacctgctgcgacgccggcgtcgctggctatctggcgcacggtcatggcgctgaagccgccatttagcgccactcgcatggcggcctgcatgataacttcccgacgcgcttcccgatttaaatagtgcatagcgacctgtaaccaagaggtgatgggatgatggtaacaaaaagttggacaggcgttcaacaatccggcaggatcgcaatcctggacgcgtgtccaatttgataaattgaggaaaagaagtatgtctcggcaatggttaacgctgatggcgattttgctggtttatatcccggtggcgattgacgcaacggtgctgcatgtggccgccccgacgctcagcgtcgcgcttggcaccagcggcaatgagctactgtggatcattgatatctattcgttggtgatggccggtatggtgctgccgatgggcgcattaggcgataaaatcggctttaagcgcctgttgctgctcggtagcgccatttttggcatcgcttcgctgtgcgccgcgctgtcgccgtcggcgataacgctgattatttcccgcgcgctgctggcggttggtgcggcgatgattgtgccggcgacgcttgccgggatccgcggcactttctccgaagccagccaacgtaacatggcgctgggattatgggccgccgtgggctccggcggtgcggcatttggcccgctggtgggcggcatgctgctggaacacttctactggggatcggtgttcctgatcaacgtgccaatcgtgctgctggtcatcgccatcaacgctaaggtcgttccacgccagcccgcacgccgcgagcagccgctgaatctgccgcaggcgctgatcctgattgcggccattctgatgctggtatttagcgctaagtcagcgttaaaggggcagctggcgctgtggctgattgtgctggtggctatcggcggcgcggccatgttgacctggtttgtccgcaagcagctgtcgatgccgacgccgatggtggatatgcgtctcttcacccaccgcattattttgagcggggtgatgatggcgatgaccgcgctcattacgctggtcggttttgaattgctgatggcgcaggagctgcagtttgtgcatcagaaaacaccgttcgaggccgggctgtttatgctaccggtgatggtcgccagcggctttagcgggccgattgccggaatgctggtatctaaactggggctgcggcaggtggcgaccggcggtatgttgctgagcgcgttgagtttcctggggctgtcgatgaccgacttcagcacccaacagtggcaggcgtgggggttaatgacgctgctgggctttagcgccgccagcgcgctgctggcgtcaacgtcggcgatcatggcggcggcaccgaaagagaaggcgtcggcggcaggcgccattgaaaccatggcctatgaattgggcgcggggcttggtattgcgctgttcggcctgatcctgacccgtagctacagttcggcgattgaactgcctgccgggattggcggtgaggcagcggtacaggcctcatcgtccatcggcgaggcgatgaaggtggcgcaatcgctccccgcgataccggcagattcactgattgcggcggcgaaaaccgcgttcattagcgcccatagcatttcgctggcgacggctggcgttctgctgttgttgctggcgctggggatctggcgtgggctgaccaatacgccggcgccacggtaatgtcatagctgaagagaaagctccatcgccgcgcgacgcagcggcgcgagggctttctccttcagcgccgcggcgctcatcgaagaggcggggacgccaacgttgagcgctgccaccacctggccgctgcgcgacagcagcggtaccgcaagcgagcataatccaacttcaatttgcctgtccgccagcgcatagccctgcatgcgaactttagctatttccgcgcgtaatgccgtggggtcgcacagggtatgcggggtgtagcgcataagatgcgcgcgtgacagtgtcacttcaagttgttcttctggcagcgcgctcagcaatacccgtcccatagaagtcgtccatgccgggaggcgactgccgcgtcccagatcgacgctcagtaagttattgaccgccgcgcgggcaatgtacagcacgttgtcgccatcaagcgtggcggcggagcagctttctcctaacgtcttaccaagattatccagcgccgtttgcgccactttcgccagcggggttcccgccagataggcgtggcccacggccagcacgcgcggtagtagttcatagctgcggccgtccgggctgtgcaccatccccagcgccgccagggtatacaggcagcggcgcaccgccgcgcgggaaatttgcgttttttgacttaactgcgaaatggtcagccgctggcgctgcggagtaaaagcattgagcacttccagcccgcgggcgagagacagcataaaattggggtcgtgctcggcctgcctggcgctcagcgtagtgggggtattgtcgctcattgcatctttctccgttgcaacgtaaagctcacggggaattactataccgcgcgcaaaccagggcgcgccgaattgtgcctgttttaccacctcgatcacattattaaccgcaatttaacaagcgtgccgataatcgcacaacatttcgattatcgccgttgaccatccgccaggctggaccctattgtcaaagcacagacatccccgttatggatgtgggtacaaaaagttatgcatctttcaggaacaaaaaatgactgcgaccgtagaacgcattgagagctggttagtggatgtaccgactatccggccacataaattatcgatgaccaccatgggctgccagacgctggtcatcgtgcgcattacccgttccgatggcgtatgcggtatcggtgaagcgacgaccatcggcgggctgagctacggcgttgagagcccggagtccatcgcatcggccttgacccattatttgacgccgctgctgaaagggcagccggccgataatctgaatgcgctgacggcgcgtatgaacagcgccattaaaggcaatactttcgcaaagtctgctattgaaaccgcgctgctggacgcccaggggaaagccttaggcttaccggtctcggcgctgctcggcggcgcgctgcaaacgtcgttgccggtgctgtggacgttagccagcggcgataccgcaaaagatattgccgaaggggaaaagctgttagccgagcgccgccatcaggcgttcaagttgaaaattggcgcgcgggaattagccaccgatctccgccatacccgcgccattgtcgaagccttaggcgaccgtgccagcattcgcgttgacgttaaccaggcctgggatgccgccaccggcgcgaaaggctgccgcgagctggcggcgatgggggtcgatctcatcgaacagccggtgagtgcgcaggacaatgcagcgctggtgcgactgagccagcaaatcgagaccgcgattctggcggatgaagcggtcgcgaccgcatacgatggttatcaactggcgcagcagggttttaccggcgcttacgcgctgaagatcgccaaggcgggcgggccgaatagcgtgctggcgctggcccgcgtcgcgcaggcggcgggggttggcctctatggcggcacgatgctggaagggaccgtgggtaccgttgcttctctgcatgcctggtcgacattgccgctgcagtggggaaccgagatgttcggcccgctgctactcaaagacgatattgtcagcgttccgctgacctttgccgacggtcaggtggtgttgccgcaaacgccagggctcggggtggagctggatgaagacaagctgcgcttctattcccgtaaagcataacaggagaaaataatgctatttaaagttgatatgaccgttaatattccgatcggttttcctgccgccgaagcggatgaaattaaacaacgcgaaaaagcctattcgcaacaattacaacgtgaaggcaagtggcgacatatctggcgcgtcgccggtctttacgccaatgtcagcattttcgatgtaaaagatgccgaagagttgcatcaaattttaatgggattgccgctgtatccatttatggatattcgcgtagaggcgctgtgccgtcatccctcgtcgattcgtgaagacgatagctaataataataacgtcgacctcatgccgggtgcacctggcaaatatcctacaatgataagagagaataattatgagtaatgctttcgtacaacaagaagccgtgcagaaattattacgtgaaggcgcgggtttaaatgtccctggcggtaatgaacgctttaaagccattgtccaccgtttactggaaaatatctgcacgctgatcgatgactataacgtcacagaagaagagttctggcacgcggtaaactatttgcatgagctgggtgggcgccaggaagcggcgctactagcggcgggtcttggtcttgagcacttcctcgacctgcgtcaggacgctatcgacgcggcggcgcatcgcgaaaccggtaccccgcgcaccatcgaagggccgctgtatgtagccaatgccccgctggccgacagccatgcccgcatggatgatggcaccgatgccggcgaagtaatgtggctgcacggtcaggttaaagataatcagggccagccgattgctaacgccatcgttgatatctggcacgccaataccctgggtaattactcgttcttcgatcagagccagagcgactacaacctgcgtcgtcgtattcgcaccggcgccgatggccgctatagcgtgcgcagcatcatgccatccggctacggctgcccgccggatggtccaacccagaagttgctggatcaactaggccgccacggcaaccgtccggcgcacattcacttcttcgtctccgcgccgggccataaacatctgaccagccagatcaacctcagcggcgacaaatacctgtgggatgattttgcctttgccacccgcgatggtctgattgccgacccggtgaaagtgagcgaccgcgagacgattgcacagcgtgaactggacggcgagcacaccgaagtgcgctttgatttcaccctctgtaaagcgctgagccccgacgaagagcatcgcggcgcccgtctgcgcgccaaagaataatctgctttagcggccccggtcacgctgctggcccgggccgcgctctacacccgatagtcaccacattcgccaaatatctttaatcctgaatcctgcaggaggagttaactcatgcaaaaaacgctatcagcgcttaaagacaaaattaacaacgcgttaattgtcgaccgtgaaaatcatatttaccgttgccaccgctctatatttaccgaccagcagttatttgattttgaaatgaaacatatcttcgaaggaaattgggtttttcttgcccatgaaagccagattgccgagccgggagattattataccctgacgctgggacggcagccggtcattattacccgtgataaaaagaatgaattgcatgcattaattaatagctgcgcccaccgcggcgccatgttatgccgacgcaaaaccgggaataaaaattcgtttacctgtccattccacggctggaccttcagcaataacggcaaattattaaaagccaaagatgagagcaccggcgcctatcctgacaccttcaaacatgaagggtctcacgatctgcaaaaactgccgcgttttcagtcttaccgcggtttcttattcggtagcctcaatgccgacgtgcagccgctggaggcgtatctcggcgaaaccagcaaaatcatcgatctgatcgtcgatcaggtgccggaagggctggaagtgctgaagggctcgtcgagctacgtttacgaaggcaactggaagctgggcgcggagaacggcgccgatggttatcacgtcagcgtggtgcactggaactatgcctcaaccatgtcacgccgcaactatgaagcggaagggacgcatgcggttgacgccaacggttggtcaaagagcgtcggcggcggctacggttttgacaatggccacttgttgctgtggacccgggcgctgaacccggaagtgcgcccggtctatgcccaccgcgagcgcctgcaggcggaattcggcgaactgcgcgccgaccagatggtcaatgaaacccgcaatctgtgcctgtaccccaacgtctatctgatggatcagttttctacccagatccgcgtgatccgcccgattgcggtcgataaaaccgaagtcaccatttggtgctttgcgccaaaaggcgaagccgaccaggcgcgggcgttacgcatccgccagtacgaagatttctttaacgtcagcgggatggggacgccggacgatctggaagagttcagcgcctgtcagcgcggctatcttggcgaaaatctggcatggagcgacctcagccgcggcgcgctacgttgggtcgacggcccggatgaacacgccaggcatgcgggctttacgccgcggctaagcggggtgaaatcggaagatgaagcgctgtatatcgcccatcatcaccattggcaaacggtcatgctggcggcgctggaacaggaacaacagcgttacgaccagtccattacccagcgcgtggaggtggcctgatgttgaatctcgaacaagttcgccagtttctctattacgaagcccgtctgttagatgaccgtcagtgggatgagtggctgagctgttacagcccgcaggtggtctactggatgccggcatggggcgacgatgaccaactgacgcgcgacccgcaaaaagagatttcccttatctactaccccaaccgggaaggactggaagatcgcgtctatcgcattaaaaccgagcgttccggcgccagtacgccggagccgcgcaccacgcacattatcagcaatgtcgagctgatgggcgaaagcgatgaggggcttgcggtgcgctacaactgggttacgtggagccatcgctatcaacacacggatgcctattttggctctacctgctgcacgctaattgagcaggacggcaggccgcagatcgttcgtaaaacggtacgcctgaataacgactatatccgtcaggttatcgacgtttaccacatttaagaggcgcttatgacttttaatattgctcttaatttcgaggacggcattacccgctttattcaatgccatgccggggagaaggtgctggatgcggcctatcgccagaaggtaaacctgccgatggactgttcggacggcgtttgcggcacctgcaaatgccattgcgccagcggtgaatacgatctgggtgaagattatctcgacgaggcgttaagcgacgacgaggcgcaggctcgccaggtgctgacctgccagatggtcccgaccagcgattgtgtgatcgatgtgccggtggccgccgcgcagtgtaaaaccgcgctgaccgacaccggggcgcaggtgcggcaggtgaatttactgtccgataccgctatcgaactggtggtcgcgctggatgagccgctggcttttctgccggggcaatatatcaatattcaggtgccgggcacgactcatgtgcgcgcctactcattcagctcgctgccgggttctcacgaagggcgttttctgatccgtaacgtgcctggcggcatgatgagccagtggttaacccagcaggcgcggcccggcgagcgcctgaccctcagcggcccgatgggcagcttctatttgcgcagcggcgaacgtccgctgctcatgctggcgggcggtaccgggctggcgccgctgctgtctatgttacacaccctgcagacacagggtagtcagcgtccggtaacgctactgtacggggtgacccgtgacggcgatctggtgaaaaccgatgcgctggacacctttgctcaacagcttacggggtatcgctggctgccggtggtggcggatgaaagcagttcctgcccacagcgcggctttgtcaccgaacatctggatgacgcgatgctgaataacggcgacgttgacatctatctttgcggaccgccgccgatggtgaatgcggtcgccacggcgctgcgcgaaaggggaatttccccggcagggttctggtatgagaaatttatcgccagccagagcgcggcggcataaggaggcatgatgcgttttaccgataaagtcgtcgctatcaccggcgcggcgcaggggattggcaggcagaccgcggagcaggcggcaactgaaggcgccgccctgttgctgattgaccgctcgccttacgtacacgaactggctgccattttagcccaggccggaagccaggtactggcgctggaggctgaccttgagcagtggcagagtaccgaccaggcgtttgccgccggggtcgcgcattttggccgcctcgacgtgctaatcaacaatgtcggcggtaccatctgggcgcgacctttcgctgagtatcagccagaacaaattgagaaagagatccgccgctcgctgttccccaccttgtggggctgccgcgcggcgctcccctggatgctgaagcaggggaaaggcagcatcgtcaatatctcgtcggtggcgacggcaggggtgaaccgggtgccttattcggcggcgaagggaggcgtgaatgcgctgacccgctcgattgccatggagtacagcggtagcggcattcggattaacgccgtcgcgccgggcggtacggaggcgccgccgcgcctgacgccgcgcaacgaagagctgccgagcgagcaggaaaaggcgtggtatcagcaggttgtcgatcagacggtggcgagcagcctgatgcaccgttacggcacgctggcggaacaggcgaatgcgatcctgtttctcgccagcgatgaggccagctatatcaccggcgtaacgataccggtggcgggcggcgatctcggctagcggcgagtggcataccagcagagcagggagccgagacacaccatcccggccccctgccagaatgaccatgagagcgcggcgctgagcagcaccgccgccagcgcggaagagagcaccggcgtgaagtacgacgccgccgccagcaggctgacgttgccgtgcaggatgccaacgttccatgccgcgtaggccagccccagcgccacggagaccgtaatcagcttaatgactaccggccaactgaacagcatcggcggctgcgcgctggcaaaaaatttcagccacagggtcagcgccgttaataagacgaagagggtaatgccatttttgcctttggcatatttcgcggtaaccgtgcagtagaccgcccagataaacgcgccgataaatgccagaaaatagctcagcggactggagatgacgttattgataatttcatcgaggttgagtccgtgttcgccgccgagcacccagctcacgcctaacagcgccagcagtaagccggggatcaccagccagctgcttctctgaccgttaaaaagaatggcgaataaaatagtcaggctgggccacagataattgaccatccccacttcgatagcctgctggcgggtggcggcgaaacccagcgacagggcgaggcagatctcgtagctgacaaacagcacactgccggccaacagatagcggcgcgggacctggcgcaggttgggaaagccaacggtgaaaatgagcagcaggccgctcaggctataaatcatcgccgcgccgccgacagggccaagcccttcgctaacgccacggatcaaaccgaccatcgtgctccataagataatggcggcgaagccgattgacgtcgctctctttttttccatgtttaacctgatagtgactcaaacgcagccagaatttataacatcttttcgctcacggcagtcgatcttttccgtgccacctaactctttggggttagtcaaactcgccaccgctgactcttaagggggcgagcgttggcgaccttgatttgacgcaataaaaaaagggatattgctgttagtttcctccgcgcgatgaactaacatcctgcatggaggaatcaatggacgtcagccgcagaaagttttttaaaatctgcgcaggcggtatggccggaacaacagctgctgcactgggctttgcccctaaaatggcgctggctcaggcacgcactttcaaattgctgcgcgcaaaagagatccgcaacacctgcacttactgctccgtgggctgcgggctattaatgtatagcctgggcgacggcgcgaaaaacgccaaagaagcgatttatcatatcgaaggggatccggatcatccggtaagtcgcggcgccctgtgcccgaaaggcgccggtctgctggactacgtccacagcgaaaaccgcctgcggtatccgcaataccgtgctccgggctcggataaatggcagcgcatctcctgggatgaagcttttaaccgcatcgccaaattgatgaaagccgaccgcgacgccaactttattgaaaagaacgagcagggcgtgacggttaaccgctggctttccaccggcatgctgtgcgcctcggcggcgagtaatgagaccggcatgctgacgcaaaaatttgtgcgctcgctcggcatgctggcggtagacaaccaggcgcgcgtctgacacggaccaacggtagcaagtcttgctccaacatttggtcgcggtgcgatgaccaaccactgggttgatatcaaaaacgctaacgtcgtgatggtgatgggcggcaacgccgcggaagcgcatccggtgggattccgctgggcgatggaagcgaaaaacaataacgatgccacgcttatcgtcgtcgacccacgctttacgcgtaccgcgtcggtggccgatatctatgcgccgattcgttccggtaccgacattacgttcctgtcgggcgtgctgctgtatctgatcgaaaataataagatcaatgccgagtacgttaagcattacaccaacgccagcctgctggtacgggatgactttaccttcgaagatggcctgttcagcggctacgatgcggaaaagcgccagtatgataaatcgtcctggaactaccagttcgatgaaaatggctacgcgaaacgcgatgtaacgctcagccatccgcgctgcgtgtggaatctgctcaagcagcacgtttcacgctacacgccggaagtggttgaaaacatctgcggtacgccgaaagaagacttcctcaaagtgtgcgaggtgctggcttcaaccagcgtcgcggatcgcaccaccaccttcctgtatgccctgggctggacgcagcacaccgtcggcgcgcagaacatccgcaccatggcgatgatccagctgctgcttggcaacatgggcatggcaggcggcggcgtcaacgccctgcgcggacactccaatattcagggtctgacagatttgggcctgttgtcgaccagtctgccgggttatttgacgctgccgtccgataaacagagcgatctgcaaagttatcttagcgccaacacgccaaaagcgacgctggccgaccaggtgaactactggagcaactacccgaaattcttcgtcagcctgatgaaatcgttctacggcgatgcggcgcagaaagagaatgactggggcttcaactggttgccgaaatgggatcaggcctacgacgttatcaagtacttcaatatgatggataacggcaacgtcaccggctatatctgccagggtttcaatccggtagcgtccttcccggacaaaaacaaagtggtgcgtagcctcagtaagctgaaatatatggtggttatcgacccgctggtgaccgaaacctccaccttctggcagaaccacggcgagtctaatgatgtcgacccgaccgcgattcagaccgaagtcttccgtctgccgtcgacctgctttgccgaagaggatggctcgatcgccaactccgggcgctggctgcagtggcactggaaaggccaggacgcgccgggcgaagcgcgcaacgatggcgaaattcttgccgggatctatcaccgtctacgtgagctgtaccgtcgcgaaggcggtaagggcgcggaaccgttgctgaaaatgagctggagctataagcagccagatcatccggaatcggaagaagtagcaaaagagaacaacggctatgcgctggcggatctctacgatggtaatggggggctgctggcgaaaaaaggagagttgctgaatagcttcgcgctgttgcgcgatgacggcagcaccgcgtcgtcctgctggatctacaccggctgctggaccgagcagggtaaccagatggcgaatcgcgacaacgccgatccttcgggacttggcaatacgctgggatgggcctgggcctggccgctcaaccgccgcgtgctgtataaccgcgcatcagccgacattaatggcaaaccgtgggatgcgaagcggatgctgatccagtggaacggcagtaagtgggtcggtaatgatattccggacttcaataccgcgccgccggggagcagcaccggaccgtttattatgcagcaagaggggcttgggcgcctgtttgcgctcgataaactggcagaagggccgttcccggaacactacgagccgatggaaacgccgcttggcaccaacccgctgcacccgaatgtggtctccagcccggttgtgcgtttgtatgaagatgatgccattcgcctgggtaagaaggataagttcccgtatgtcggtactacctatcgcctgaccgaacacttccatacctggaccaagcatgcgttgcttaatgcaattgcgcagccagaacagtttgtcgaaatcagcgaagggctggcgaaaagcaaaggtatcgctaatggtgactgggtgaaagtcagtagcaagcgcggctttattcgcgcggttgccgtagtgacccgtcgactgcgcacgctgaacgtcaacggccagcaggtagaaaccgtcggtatcccgctgcactggggctttgaaggtgtggcccgtaaaggctatatcgccaacaccctgacgcctaacgtcggcgattccaactcgcaaacgccggagtataaggcgtttctggtcaacatcgagaaagcgtaaggagcgattaaatggcgatggaaacacaagacattattaaacgctccgcgaccaacccgataactcccgcgccacgcgcgcgggactataaggccgaagtcgccaagcttatcgatgtctcctcctgcgtaggttgtaaagcctgccaggtggcctgttccgagtggaatgacatccgcgatgaagtagggcactgcgtcggtgtgtatgacaacccggcggatctcagcgctaaatcctggacggtaatgcgctttagcgagaccgaacagaacggcaagctggagtggcttatccgcaaggatggctgtatgcactgcgaagagccgggttgcctgaaagcctgcccgtccgccggggcgattattcagtacgccaacggcatcgtcgatttccagcaggaaaactgcattggttgcggctactgcattgccgggtgtccgtttaatattccgcgcctcaataaagaggataaccgggtttataaatgcacgctgtgtgtggatagggtcagcgtcggtcaggaaccggcctgcgtgaaaacctgtcctaccggcgcaatccacttcggcacgaaaaaagagatgctggaagtggcgcaggagcgggtggataagcttaaaaagcgcggttatgccaacgctgggatctacaacccgcagggcgtaggcggcacccacgtgatgtacgtactgcatcatgccgaccagccggagctgtatcacaagctgccgaaagcgccgcagatcgataccagtatcaatctgtggaagggggcgctgaaaccgctgtcggcggcgggctttattgccacctttgccgggctgatttaccactacatcggtatcgggccgaacaaggaagttgatgacgatgaggaggagcatgatgaataaatcgaaaatgatagtgcgcaccaaatttatcgaccgcgcctgtcactggacggtggttatctgtttcttcctggtggcgctgtcggggatttcgtttttcttcccgaccctgcagtggttgacggaaaccttcggcacaccgcagatggggcgtatcctgcacccgtttttcggggtgctgatttttgtcgcgctgatgtttatgtttgtgcgttttgtccaccacaatatccctgataaacaggatattccctggctgaaaggcatagtggaagttctgaaaggcaacgaacataaggtcgcgcgcgtcggtaaatataatgccgggcagaagatgatgttctggaccattatgagcatgatttttgtgctgctggtgaccggggtgattatctggcgcccatattttgcgggatatttcccgataccggttattcgttacagcctgctgatacacgccacttcggcgattatcctgatccacgcgatcctcatccatatgtatatggcattctgggtcaaagggtcgattaaaggcatgatcgaaggcaaggtgagccgccgttgggcgaagaaacatcacccgcgctggtatcgcgatgtcgaacgcctggaagcgcaaaaagagagccgtgagggaatgaagtaagcctttacgggggaaacccgctccgaagatattggggcgggctccccgcattcagcagttagtgataagtgtatcgattgaatcaatcaccccctgacgcgcacaactcagattacatacgaaatcctgtagctggattcgtttattatttaaattactgatcatcggcgtacaaagtaaaaagctgtcaaactctatatttatccttgggacgacatgctgatgccaacgaggtaactgtcgcgcccgtattaaaggaataatgactctagtggccaggtcagcatagtaatcattctacactatcatataatacggcagggtgttatttgtttgcgcagaacaatttcgatagacattgaattgttcaagcatcatagtaccctgaaaaattcatcatctgtgagagtacctttttttgcaataaattcattcattgcggcaatgaattccttatgctgtcgctgcttatcgacttctcgtaaatcctttcctgcctgcgctgactccttccgggttggcacgtcaatacattttttacgtagcgtattacttttcatcgtaggctccttgctggtggttcagtgattattctctttactcacttaaaaataaacctcagcagtaattttaatatttattttgcgaggcggattccagcgcaacgcaacagatgaaatattaacgtttattgtaataatcctttgcgcaggggtaatactgcgcaaaggtgataaagctattccttcaaaacttctcaggaataaaccggaaaggaaaatgggtcggtttcactttgccaattttacgtttcggtaaggtaatgtgttccgttggcagagactcgtaggggatctgcgaaagcaaatgggtaataatattcagacgtacgcgttttttatcttccgaacgggcgacaaaccacggcgcccaggcggtatcggtggcggcaaacatcgcatcgcgcgctgtggtgtagtcatcccagcggttgaaggattttatatccatcggcgatagcttccagattttgcgcccatcatcgatacggtcgcgcaggcgccgttcttgctcctgcggcgtcacctccagccagtatttcagtaaaataatgccggaatcaaccatccctctctccaccattggcgcgccgtcgaggaatttttgcacctcctcctcggtacaaaatcccatcacccgctcaacgccggcccggttgtaccagctgcgatcgaaaatcactatttcgccggcggcgggaagatgcttgatatagcgctgaaaatagagctggctgcgttcgcgctcggttggcgcgggcagggcgacgacgcggaaaacccgcgggctgacgcgttcggttatcgctttgatggtgccgcctttgccggcgccatcgcgaccctcgaagacgatgcataccttaagccctttatgcacgacccaccgctgtagcttgaccaactcgacgtgcagtttacgcaatgcctgctgatattctttctcgcttaacggctccgttttggcgggtatgacgggcgcaacggctttcttcttgtttcccatggctgtcctcatgcgtggtggcctgaaaggcaggtcgctgtttaaagtgtaatcagagccaggcaaagcggcggaaaacttctcatccagtggagggcgcaagatagccattaagcgcatcaactcactgttgattaatgaggaatcgggtaggatagtctcgtcaatttactaaaatcattcagggagagagtatgtcgaataaacttctgcaagtgcactttgcttttagcggaccgtttggcgatgaaatgtcggcgcaattagccgaactcgcgcaatctattaaccaggagcccggttttatctggaagatctggacggagaatcgcgccacgcaggaagccggcggcatatatctgttcgaagatgaacagagcgcgcaggcttatgcgacaaaacacgccgcacgcctacggcaatttggcgtgcaggagatgttcttcaagattttcgacgtcaatttaccactaagccagattaaccacgggccgctcaattaatatgggaccgtggttacatatagcgctcaaactgccatgccgccacggcttcgaggataaacagcccggataccacaacacccgccacgcgatggcgggaatagaaaagtattcccgcgaccacggctaacaccggtaacgtaatgggccagcaggcgacaatagtaatccaggcgatgatcagataatccttcatcatggcgaatactccatggtcaacgtttaccggcgcgaacaatgcgccggtataaatcagaattcgacgacgccgccttgttcaatacggtcaatatcattggtaacggggttcaccttttcgttgtaataggtgtaggcgttaacgtcgggggtcatcgttaattttggttgttccgttttcgattcaggcgattccgtaggtggattagcggcaaggtctgccggttccggcggcgtatagtgtaactggtcggcgagactccccgccgcgaaggcgcaggcgttaatagaaagcgcgctgaaggcaataataattaatttttttaaagtcatgattttcatccatgaggcaaaacccgccacggcggcaggtaaaaagagcaaggcttaagataatacgtaaaagaagttaatgtttcaaagcgtaaacgccgtctggtcgcataaaattgctactcctcgataattctttatggtagctgcctgtaataccgagcattccccatcacttgtcattgatttcacattaatgcagcaaaattttcactagttttgatcatctccgcacttttgcaccagcccggtgcgcaaggttgctaaagacgttctatgtttagctcactgtcggtatggacaccagcgttcccggcaggccacgtgacggcaacagacctcctgacctgtaaagactggcgcatcgccggggtggtaccgattgcggtcacgctacgcgactattagtaatcgatctggcgatacctctcttcctggcgggttttttgctttatctaccgaagccgctacggcttattccagcattggcacgttacgctgtaagtggtttttactgcgccagtttatggcgtctgttcgatatcgctgaggactatccgaatgtctttaaaacttaaaaagttgactctgcattttgcaatagcaggttgtttgagcgcggcattttatgcacaggcggatgtgaagattggcgtggccggcccatttaccgggccgaatgcgacctatggcgcccaatactggaaaggggcatcgcaggcggcggcggatattaatgccgccgggggaattaaaggcgaaaaaattgtgctggtgcagggtgatgatgcctgtgaacccaagcaggcagtggcggtggctaaccgcctggttgatgattccggcgtctcggcggtggtgggccatttctgctcttcctcgacgatgcccgcctccgaggtctatgacgaagccgggatcctgaccatcacgccgggctccaccaatccgcagatcaccgaacgcggaatgaaagatatgttccgcatgtgcgggcgcgatgaccagcaaggggtgattgccgccaactacatgctggatgtgctgaaggcgaagaagatcgccgtcattcacgataaagatacctacggtcagggcttagccgatgcgacgcgcgcggcgctcgctaaacgcgggacgaaagaggtgttgtatgaaggcttatcccgcggggaaaaagatttcaatgccctggtaaccaaaatcggcgccctgaaaccggatgtggtttattttggcggctgccatccggaagccggcccgctggtgcgccagatgcgcgagcagggcgtccaggctaagttcttctccggcgactgcgtggtgaccgaagagttggttaccgccgcgggcgggccgcagtttactaatggtgtgttaatgaccttcggtaaggatccgcgcaccattcctgaaggtaaagcggtgatcgacaaattccgcgccagcggttttgaaccggagggctataccctttacgcctatgcgtccattcaggctatcgccgccgcctataacgccgccggtaccgataatgccaaagccagcgaatggctgaaaaaccacagcgtcgataccgtgatggggaaaaaggcctgggatggcaaaggcgacctgaaagtatcggattacgtggtttatcaatgggatgataaaggcaaatatcatcagctgtaacccgggattgtagtgcgcataacgccctcatcagaggggcgtcgtaccaccgtaagcagcagacgttaaggcctctgcgtctgctgcaccttgactggcaggatggttcctatggcggcattctttctgcaacaactgatcaatggcttaacgcttggcgcggtatatgggcttatcgccattggctacaccatggtttatggcatcattggtatgattaacttcgcccacggcgaggtatatatggtctcagcctacctgtgcgctatcgggctggcgctgctggcctacttcggtattcactctttcccgctgcttattttcggcacgctggtgtttacgattatcgtcaccggggtgtacggctgggccatcgaacgcattgcttatcggccgctacgtaactcaacgcgtctggcgccgctgatttcggctattggcatgtcgctgattttacaaaactacgtccaactgagtcagggcccaaatcaacaggggatcccgacgttgatgcacggcgtactgcggcttacggtaggagatggcgtggtgcaaatcacctggaccaaaatcttcatcctgctcgccgcctttatcggcatggtggtgctgagctggataatcaaccacacgcagttaggtcgggtttgccgcgcgacccagcaggatcggcgaatggcggccattctcggcattaacaccgatcgggtgatctcgctggtgtttatgattggcgccgccatggcgggcctcgccggggtgctggtgaccatgaattacggcacgtttgatttttatatcggcttcattatcggcattaaggccttcaccgcagcggtactgggtgggataggttcgctgccgggggcgatgcttggcggcctgctgttgggcgtcgccgaggcgcagttcgccgggttagtgaactcggattataaggatgtcttctcgttcgcattgctggtggctatcctgattttccgtccgcaggggcttctgggccgtcctgtggtggccaaggtctaagggggacatatgaccgatatttcccgtttagacggcatcgacgtcaaacgaagcgttatcgatagcgtattggccggtttatgcgcgctgatagtctttggcccgatcgtggggatcgtgctgaaggggtacagttttacgctttccccgcagcgcgtcttcgtgctggtggcggtggtgatggcggggcgtctgttgctcagcctgcttttgcaaacccgcggggggaagcggtttatcggacgttttgaaggcaacgatcagggggtatttgtccgtccccccggctatcgtagtcggctgcgttttgtcctgccgctgctggcgatcgtggctatcgctttcccgttaatggccagtaagtatctgctcaccgtggcgatcctcgggcttatctacgtcctgctggggctgggattaaacatcgtggtgggtctcgcagggttacttgatttggggtacgtcgccttttacgccattggcgcctatggcctggcgcttggctatcaataccttggcttaggtttctgggcaatgctgccgctgggggcggtgatggcggcgctggcaggagcattattgggttttccggtattacgaatgcatggcgactacctggctattgttaccctcggattcggcgagatcatccgtctggtgctcaacaactgggtaagtttcaccggcggccccaacggcgtttcggtgccgtcgccaacgctcttcggcctcgagtttgcccggcgagccaaagagggcggcaccccgattcatgaatttctgcatatcgcctacaaccccaaccttaaatttatttttatctatgccgtgttatttatcgtggtaatgatggtgctgctgataaagcaccgcctgacccgaatgccgattggccgcgcctgggaggcgctgcgggaagatgaaatcgcctgccgggcgatggggctgaatcacgtactggttaagctgtccgcgtttatgctcggcgcgtcgacggccggcatcgccggggtctttttcgccacttatcaggggttcgtgaacccgacctcgttcacctttttcgagtcggcgctgattctcgctatcgtggtattaggcggcatgggctcgacattaggtgtggtgctggcggctttcgtgctaacggtcacgccggagttactgcgcggctttgacgaataccgggttttgctctttggcgtgctgatggtcctgatgatgatctggcgcccgcgcgggctggtgcgcaccgggcgtaccggggtggaaatccgcaaaggagtcgcgccatgagcgatgcaatattgcaggtcgagcatctgatgatgcattttggcgggattaaagcgctgaatgatgtcaaccttgaggttgaacgcggatcgattaccgccctgattggcccgaacggcgcggggaagaccacggtgttcaattgcctgaccgggttttaccgcgccagcgggggcgccattcggcttaatgcccggcaacgaatgaccgatgtgattcaggttctcgggcagaaactgcatgccgatgattttttccatcccgcgcgtctgggacggcggatgtactacaaaatgttcggcggcgcgcatctggtcaaccgcgccgggctggcgcgtaccttccagaatatccgcctgtttcgcgaaatgacggtgattgaaaatctgatggtggcccagcatatgcaggttaaccgccatctgatcgccgggatcctgaatacccgcggctatcgccaggcggagaaccgcgcagtagagcgggccttttactggctggaagtggtggagatggttgactgcgccaatcgactggcgggaacgctctcttatggccagcagcggcggctggagatcgcccgcgcgatgtgtaccgggccggaaatactgtgtcttgacgaacccgcagccgggctcaacccggcggaaacgcgtgccctgagccggattattcgttttctgcgtgaacatcatggcgtcagcgtactgttgatagaacacgatatgagcatggtgatggaaatctccgatcgcgtgatcgtgctcgaccacggcgatgttattgctcatggcaccccggccgagatccaggccaacctgagcgtgatcgccgcatacctgggtaccgatgaacaggagatcgcctgatgagccaaccgttgctggaatttcgcgaggtgaacgtctattacgggcaaatccaggcgctgaagtcggtatcgctaatggtcaatgaaggcgaaacggtggcgttaatcggcgctaacggcgccggaaaatccacgctgctgatgtcgattttcggccagccgcggattaccgatggcagtattatctatcgcggacatgatatcagccgccagtcgacgcactatatcgccaccaacggtattgctcaggcgccggaaggacggcgtatttttgccgatatgacggtggaagaaaacctgctgatgggcactattcccataggtaatcgttatcagaatgaagataaggcgcggatgtatcagctgtttccacggctggaagagcgtcgcgcgcagcgggcgatgacgctctccggcggcgagcagcaaatgctggcaatcgcccgagcgctgatgagccggccaaagctattgctattagacgaaccgagcctgggtctggcgccgctggtggtgaagcagatcttcagcgttttgcgcgagttgaccgacctgggcatgacgctgctgctggtggagcaaaatgcgcaccacgcgctgaaactggctaaccgcgcttatgtgctggtcaacggcgaaattcgtctgagcggtagcggcgcagagttgctggataacccggaagtcagaaatgcttatctggggatgggttaagttgtcgtcggtcgtaaggggagaaaacagggtgtgaaatcggttacactagcgtcgtgaacgcacattaaagtgaccgaatagatgaagaaaacgattttttccttagcgctggggacctttggcctcggaatggcggagttcggcatcatgggggtattgcctgaaatcgcccatgatgtcggcattaccatccccgcggccggcaacatgatctcgtggtacgcctttggcgtggtgtttggcgcgcctgtcatggcgttgttttccagccgtttttcgctgaaatcagtgatgctgtttctggtggcgctgtgtgtggcaggcaacgcgttgtttaccttctcctcaagttatcccatgctggcgctcgggcgctttatttccggttttcctcacggcgcttattttggcgtcggagcgattatcttgtcgaaaatcgcctcgccgggcagggttaccgcggcggtcgccgggatgatagcgggtatgacggtggcaaacctgcttggcgtaccggcgggcacctggcttggccatcagttcaactggcgttataccttcacggccatcgcgctatttgatgtgctggtgcttttggcgatactgcgctgggtgccaacgctgtatgacaaatcaaccacccggctcagtgaacaattccatttccttaaatccccggcgccatggtttattttcgccgccacgatgttcggcaatgccggcgtttttgcctggtttagctatatcaagcccttcatgataaatgtctccggctttagcgaggcggcgatgatgttcattatgatgctggtgggattggggatggttttaggtaatctctttagcggcaggatctctgggcgttacagtccgctgcgtattgcggcgatgaccaacggcgtcattgttgcggtgttactgctcatctttgcctttggcatacagccgctggcttcgctggtgctggcgtttatctgctgcgccgggcttttcgcgctcgccgcgccgctgcaaatattactgttacaaaatgccagaggcggcgaaatgctcggggcggcgggcggtcagatagcgtttaacctcggcagcgcgattggcgcctactgcggcgggatgatgattacctttggcgcgggttggcgttcggtcgcgctgccggcggcagcgctgtcgttcctggcgatgagctcgttgctgctgtatgcgcgataccagcggcgggtaacgcgtcatcgcgttacccaggcagagcaggcctgattaatctcgccacggttcgccaagggttagcatcaggcggttagcccaggcgaagaatgccgtcgattgcagcaggtccagctgttcgacgatatccagaccctgctgctccagcgcgctgagatgcgctggggttatcgcgggcggggtgacggaaagcgcggcggcggcgtcaatctccgcctgccagcgcggcccttggccatcgctgagattctccccaggcgttaccgccagcagggtctccaccgctcgctcatctttggacaactgcgccgccttgcgcgcgtgtaccgacgcgcagtagatgcagccgttgattttactcgccaccgtggccgccagttcacgctcggcgcgcggcaggccgcccggcgtatagaaaatccctttatcggtcagcgtgcgctgttcaagcaccggctgattgcgcgccagtaagcgaaagtaggaggaatcagtgtggccgaactgcgccagcagcgcctgctcggcggcgttaaattcagcgagaggcttatcggcaatccacggttcccagtgtaattcatcacgagtaaaggccaccggcgcaggtttaccgctaaccgtccggggattagtgtgccagtagccggcaaccaccggggtcccggctgcggaaattggtttgccatttaacaatcgtaatccgctcagcaatcggctttgaaaactgacaaacgcaacaagctgcgccagcgtcacaataccgcgcaggctccagcccgcgtcgcccagcgtttgcagcgccgcgggcgtcgcttccaccggggtgaaggtcaacaggcgggcaaaccccagcgcagcggcaagccgtggggttgtcgggtcggcaataccgaaaccggcgtaatgcgccgccagcgcgtctgcctgatgaagtctggccacttttgcggcgacggcgaaccgttcttcgagcggaaaatcctcatcctgttggctaaatagcacctcgtaacttccctgggcgtggcgggtcgcagcctcgcgcaaagcgcgggccttgcccagcgctgaatcggcggcgatctccgccagttcagccaaaatatcctgacttaagctcatagcgactccttatctgaattgcggggcaatgtgtttagcgatgagttcgatagaacgcagcgtgtcctgatgcgatggctccaccgaatggacctgaaacgaaatgtcagttacgcgggctagcacgctgtctttagccagcgatgcaagcacatgtggcgcatcgccaatgtgggcatccaactggcgagcgtaatccgtgacggtgtcaccaataatctcatgaccggcggcgcgatgggctgccgcctgtttacttaatcccggctctgcggcctgtagcgcgtacccctgactgtcggcaataaacgcggtgcgggaagccagaattctcggcgccacgccggctggcagcgcggcgaggtaggcgtcgataatcgggttctgaatcgcatccagcggcagctcgctttgaccaggcggacgcggctgtgtgcgcgatagcatcaacccgtggccggatttcgcggcccgaatagcgccttcaatcgaaaaggtggcgatccaaatccgttttgccagctgcggcgcgggcggataaagatggttgtccggatgagccaacgtatcgccgcgccaggcgctttcaatcaaatgcagatgatcggcgaagaccgcgccgcgttgttcgcaggccaggccaaaggggagaaaagaggttggcgtcccgccggaaccaaaacccacttccaggcgaccctctgcgagtaaatccagtactgccgcatcttctgcgacgcgcagcgggttttccatcggcagcgtaatgatggcggtaccgagacggatccgttgcgtatgggccgccgcatgggcaagaaacaccaacggcgacggtaatccgccttcattttcatgaaaatggtgttgcgccacccaggcgctatcaaagcccagccgttccgcgtggcggatctgctccgtcgcgagttgatagcgctcttgcggcgtggcgtggtcgagtaagcgggtaaaaaaccccaggcgtttaggcgtcatgcaacctccgtgctcggtgcgtgataatgaggaatggcggcgagcagctcgcgggtatagtcgtgctgaggcgcggcgaacaactgcttaacctcgccctgttcgatgacttgcccggtgcgtagcaccgtcacgctatgggcgatgcggcgtaccgtcgccagatcgtgggtgataaacagatagctcaacccgagctgttgctgtaattgcagcaacagggcgagaatttgcgcctgcaccgtgacatccagcgctgaggtggcctcatcgagcaccagaatcgtggggtcgaggatcaatgccctggcgatagcgatccgctgtcgctggccgccggagagctcacgagcggttcggtagagtagctccggcgccagcgcgacacgggcggcgacggactctacccgttgacgccgagcttctttggacaggcgctgaaaattcttcagcggctcttcgataatgtcgaacagggtttggcgagggtcgagtgaggcgaaagggttttgataaacaaactgaattttgcgccgcagctgccgctgggcctcgcggctcaattgtccgctggcaataccgtcgatggtcacctgtccgctatcggcctgctcaaaacccagcaagatacgggcgagggtggtttttcctgaacccgattcgccgaccagcgcatgggtactgccacgcggtaaaataaagcttacgttatccagcgcctggagatggctgccccctaacgcaaagcgtttgctcacgccttcaacccgaattgccggcgtaacaaacgggcgaatcgtggtggttaagtgcaggttctgtccctgcagatcgcacagcaactggcgggtatagccgtgctgcggggtgcgaataacatcacccgtattgccctgttcctgaatttcaccgtgacgaaaaaccaccagccggtcggcacgctgcgccgccagcgcgaggtcatgggtgacaaatagcaccgcggtgccggattcacggcgcaaatgatcgagcagatcgaggattcttttttgtaccgtcacgtcgagcgcgctggtcggctcatcggcaataagcaaatccggcttcagggcgatggcaatggcgatcagcacccgctgcttcataccaccagagagctggtgcggatactggtcgaaacgctgctctggatggcttaagccgactttttccagcagggcgataacctgctgtcgacgctcggttttactgcttttttgatgcaggcggagtatttcgccgacctgcgcgccaatggtttgcaccgggttcagcgagttgccgggatcctgtggcaccaggctgattctggccccgcgcaggttatccagccgtttgcctgaccagcggctaatctcttcaccgttgagacgaaccgtcccggcatcgaggcgggcgttttccgccagcagaccgataatcgcctgggcggtggtggtttttcccgaaccggattcgccgacgaacgccagcatctcgccgcgtttaatcgtaaaactgacccggtgaaccacttcgcgccacaacccgccagagcggtagctgatggtgaggttttctacgctaagcacgttcatcggcgctccctattgagttgttggctgatacgattggctgccagtaccacggcaatgaccgcgatcccggggaaagtggtgagccaccaggcggtggaaagatagttgcgcccctcggcgataagtaatccccattccggcaccggcggcggagtgccgtagccgagaaaactcagggttgagagggcgagaatagcctggccgaattggagggtggcgaaagccagcaccggcgaaagcgcgttaggcagaatatgccgccagaacacggccaaaaaggttcccccgctaccataggctgcttcgacatagtcgctgtgacgaatgcgcacgacttcggcgcgcgacagtcgggcgaaactggcgatcgcggcaacgccgaccgccatggcggcgttcagagtgccaaaaccaagcagtatgattaccgttagcgaaagcaggagcgaaggaatcgccagcagaatatcgacaatccgcatgacgaccgcttcgacccgcccgcccagcgcgccggcaacggtgcccaacgccgtgccgaaaaccaggcccatggcgacggcggccagggccgcggaaagcgaatgtcctgcgccgtagacgatgcggctccacacatcgcgaccgagttggtcggtacctaaccagtgtcccgcctgcggcgccagacgttgggcgccagcgatgccgtcgagtggattaaactcggtgaaccattgcggcgcgaaagccattagcaccgcaaccgtcattaccaaccatgccagccacagccccggctgcaaggaaaaacggcgccagttgaccggacggcgtcgcaccgccgaagcgtaatcgaccagactcatagcgcacctccgcgcaggggttttaagcgcgggtcgagcatcggcatcagcagatcaaccagcagattgatgacgacgaagcccagcgctgaaatcatcaccactgcctgaagaatggcaatgtcctgattattcaccgcctgctgcgtcagttggccgagcccgctgcggccaaaaacggtttcggtaattaaggccccggcgatcagttctcccagcagcaggccggcaatgtttaatgtcggcaacagagcattgccggtgacatgccgccataacacccgcgtttcgctcattcccttggcgcgagccacggcaacgaagggttgtgcggcgatgtgatccatggtgcgtaacagaatttgcgccagcggcgcggaaatcggtatcgccaccgcgataacgggtagcaccaggccttgcagaggtccgggattgataaccgggacccagtgcaattggaatgaaaagatttggattaaggcgatgccgagccaaaaggtcggcagtgaaataaacagcaccggcaacgactgtagcagattgctgatactgcgtagccccggcaaacgcgaagcgatagcgatcgcaaaggccagcagaaccgccagcgcaaaagccggcaacgccagcgccagcgtgtcgggtaaattgctggcaatcagggagctaacaggcagtccagcctgcagtgaatagccgaaatccccctgcagcatggccaataaggtgtggaaatattgctgccacagcgggctgtcagcaccgtagaccacacgcatttcggcgatctgttgcgggctcagccccagatcggggttctgaaacttaatcaaaatcgcgtcgccgggaagtacctgcagcagaaaaaaggtcagggtgaaggccgcccacagcaccagcacgccttgtcccaaccgtcgccaaagatagtggctcatggcgcccccttagtgtttatccagccatacgccgtaaaacgacggacgtcccacggcttcaaaacgtacgccttttacccatgacgcgccggcaaagacctgcggttcttcaaagatgggaatgacgtaggcgttatccagtaggtaacgctgtgcatcgccagttagctgcagacgcttttgcccatccacttcggcagagattgcggttaacagggcgttgagcttatcgtcacggaaggattttactttgtcgctcgaaccgccctgttgcagcaaggcatcgcgattagccgggaagaacatactcttcaccacgtccgggtcggcgcgaccaacttcagaaacggttaatggcgtttttagcgggtcgagattatccagtacccggctgccggcgtcgccggctttcacgcttaaggccacgccaacctgacgccactgctgcgcgaccagctgtagcacctctttgttctgcggctgcggcagggattcatagaccgtgagcgccagccgctgtcccgctttttgtcggataccatccgcgcctggggtccagcccgcctcatccagcagctgtttggctttctgctgatcgaaggccagtttgtcgcttaaatcgacgtatcccgccgcggtgcgggcgataacggaacttgcctgcggatagtttggcgagaaaagggtctcaacaacctgtttggcgttggtagcatgcagtagcgcctggcgtacccgctggtcggcaaccagcggattatccggacggaagctcaggctatcgttaacgccgcgcgtcggcgcggcgtaaatattaaagccctggtcggttgcctgtttttcatcataggcctgcacctggcgaataaacccggcctgtcccgccagtagcgcgccaatacgtacgctatcttccggcgttacgatataggtaatgccgtcgaggttcgccgggccttgctgagcaagatttttcggcccccattgataatctttccgcgccaccagcgttaattcgcgtccgggtttttcatcttttaccgtaaaggggccggaaccgatgatattgcgggcatcgcccagcgcctcaaagctccgcgccagagtgctgagggaaaccagcccggagccaattgtcgcggtaccttgcaggaatcccggggagggctttttgaagtagaatttgacggtcaacggatcgatgacttcactacgatcgtaattgttgatcacttcggaaaccggtagacgcagtgctttattgcccagaccgtaggtatcaaagttctttgcgaccgcattggcatcgagtggggtaccgtcagagaaggtgacgccaggccgcagcttaaaggtatattcggtcttatcgtcgttgctactccagctttcggcgatccacggctcgatagctagcgtttccgggttctgccaggtcaacttgtcggttatctgattgaggatcccgccgttagggtaaaaaccgccggctggcggatagagattggtgtgcggctgttgttccagataaattaaggtgccgcctttaatcggcgtttgcgcggccgaaactgaaaatgcgcctgcgataaaaagggcggcaagcgtaggcaggcgaaagcgattttgcatggtgaattcctttgttatctattgtcttgccatcatcgggcgcgacggaatacaaaggaaccaacgatttgcgctaagcatttgcgaaatctgactattcccatcatgcgggaatagtcagcaggttaggctctttcgtctggcatagtcagacagaattaacggcggaaatcgataaccatacggccgcggatttgaccctgttccatctccttaaagatggcgttgatatcgccgagcgggcgcagagtgactttcggcaccactttgccttcggcggcaaactggaaggcttcaatcagatcctgacgggtacctaccagtgaacctactacttcaatcccgtccagcaccagacgcggaatatcgaggctcatcgcttccggcggtaggccaacggcgacgacgcggccgccggcgcgaaccgcatccacggcagagttaaatgccgctttagcaacggcggtaaccacggccgcgtgggcgccgccggttttctcctgaatgattttggcggcgtcttcgttgcgggaatttactgtcaggtcggcgcccatcgaggcggcaagctccagctgcccgtcgttgacgtcaacggcgatcactttggcattaaagacgtttttggcatattgcagcgccaggttacccaggccgccgaggccataaatggcaatccactggccgggcttgatgtgtgagaccttcaccgctttataggtggtgacgccggcgcaggtgatgctgctggcggcggcggaatccagtccatccggcactttgaccgcgtaatcggcggtgacgatacactcttcggccatcccgccatcgacggtataaccggcatttttcaccgagcggcacagggtttcgttgccgctgttacagtattcgcagtggccgcaaccttcaaagaaccacgccacgctggcgcgatcgcccggcttcagcgacgtcacgccagggccgactttttccacgatgccgatgccctcatggccgagaatgacgccggttttatcgccgaaatcgccgtttttcacgtgcaggtcagtgtggcagaccccgcagcattccattttcagcagcgcttcgccatgctccagcgggcgtaactttttatcggttacatcaatctggtggtcgtgggtgactacagcagctttcatgcgtttctccttgttaatgatacgaaggtgctaacagcgaaaataatactcattaaggattagatcttatgtcgctaattacaagcggtatggttgggaatggggggatttgccgcatatttggcacaatattcatccgtttataccaattttagggggcggaacccgaaaggatctgagtatgccagggtcattgacagggcgtgttgataatggttgtataatgcaaccacctttcgcggatatgaccatgcctgacactttacttatcaatcaaattcgttccgcatcacgattgatggtgcgcgagctcggctttatgaacagcacgctggcggcgaccgactattcaccttcagcggtgcatgcgctgctggagatttctactcatggcgcgatgaccgccgcgcaactggtgcaggtattggggctggacaaatcgagcgtcagccgaatgttatcgcgcctgcagaccgctaacgagatagaggaaaatggttgtgttgatgacgggcgttttaaacaactctcattgacaaccaaagggcaggcgacggtcgcccgcattcatgagtacggcgccatgcgggtgattgaggcgctggcgcatttggatagcgcacagcagcagatcgttgccgaggggttgacggcctattcgtgggcgcttgagtgctgtcgtcagcagccggtcacgagcagaccaaacgacatcacgatagtaaccggctatcagccgggaatgattggccgcattgcgcaaatgcacggtgagtattacgcccgtcattacgacttcgggcatttttttgaaggtaaagtcgccagcggtctggctgaattttctggcaggctgaacaatcaacgtaaccagatttggctggcggtcaaaaatggcgtcatcgtcggctctgtcgccattgatggcgaagacctcgggaataatgaagcgcatctacgttggtttattctcggcgatggctgtcggggcaacggcgtggggcgccgcttgctgactgaagctatcaacttttgtgataatcagcgcttcgatgcggttcagctatggacgtttagcggcttgcaggcggcgcataaattatatgaatcctttgggtttacgctgagtaaagagtggcagggcgaacaatggggaaagaccatgcttgagcagcagtttacccgccgctaaagccgtcatgccaccggggccctaaagctccggtggcataagcgtgttaactcaactgtatattaatttcctcaatctcctgacgccactgcgcctgtagctgcggtttctgatgcttcggcttacgctgcagatcgtccgccaataactgctccagcatcaccagacgttccagcagatcctcttgcaggtcgtcgacgggcggcgcctgcggcggcgtttgcgtcgccgggctttgaaggcgctcgttgccgcgcagacgggcgtacacctcgtcgacgtcgtgccactcgcttaacccgttttcatcaattaaccagaagcggttacagctctggctgatgagctgtcgatcgtggctaaccagcagcagccccccgggatactcccgcaacgtcgccgccagcgcctcttttccctccatatccagatgattggtgggttcatcgagcagcagcaggctatagctcgccagcgacaggccgacaaacagcagccgtgaacgttcgccgccgctgagggtgctgaccttctgcccgtgtcgcgcccagccgaagccggcggaaatcagcgcccgcttgcgcgtttccggcgaaggctcaaagggctccagcgcctccagcaggctggcctcatccgccagttgatgcagggtttgatcgtaataacccggatgtagtcgaggatgtaaacgcagcccggcttcgctagccggttgctgcatttgtcgccataacaggcgcagcagcgacgatttcccaccgccgttgcgccccattatcgctacccggtcgccgctttgcagccgcgccagaccggtggtgaacagggcggggagaccgggcgccggcggcacggggagattttccatctccagaagacggtcggcgcgaacggcgtcgccatgcacctcaagacgccacggcgtgccggcggtgagttccgtctggctatccttcaggcgtgaaacctgcttttccatctgcttggctttacgcgccagatcttcgttatcgtaaacccgaccccagatggccagccgtttggcgctggcagcgacgcggtcgatctccttttgttccgctttgtggcgcagagcatcgcttgcatcttgctcctgcagcgcctgacgggcggcgctgcagggtagtgagaaagcgtgcatcgtgttatcacgtaaaatccaactggtattagttacagcatccagtaagaggttatcgtgcgacaccaccacgaagctcccctgccaggtttgcaagaagctttccagccacagcagggtcggcagatcgagatggttgcctggctcatccagcaacagcaaatcgggttgttggatcaacgcgcgggcgagcaacagacgagtatgttgtccgccgctcagggtggcggcttgctgttgggtctgttgaaccgtaaaacccatttcagcgagcagtcgctccgcttgccagcgcagcaaatcccgttcgccaggcgccagtttttccagtaccacctgcaatagaggttggctgagtagggcgtcaggcagatgttgttccacgcgcgccagcaggcagtgattagcccgcgatacgctgccagaattcggcgtgagagtgccgtccagcacctgcaataacgtgcttttcccgcaaccgttatagccaatcaggccaatgcgatcgccttttttcagggtaaaggagaggtcgttgaaaagtgggccaaaggccgtatcaacgtggagagattgtgcgcttaaaagtgtgctcattgtgaacttactcaagagttacaggcatgagaatgcctcgtcaaacatcgctgacgataacccggtaagcccgaggaagggatttagtcgttggcttcttcgctcaagctaaagttatcgcagcacgataccgataacgcttgagctggtgcgatcgccaaatgtatgtgaaacattaaacagttcacagtacagcatggggatcctccttattttttcagtaggttgatggatgcagggagtgtagtggctaaattgtcttttgaccagataccagcattgaggatcgcgccgccggtcttatcggcggcgggtatgacgattaggccggagccacggtgagtagtaggttggcaaaacgacgctgttcgccggaagcgatgaccagttgggtcaatggcagccgggactttgcgtagaaagcttcgcgttcgacatattcaagcgggcagtttgtcggtagaaactcccggtattcactggcaatggtgttagtgaattccgctggtgatgccatcagcgtcgcgtgttcgacattaacgcaggtaagcagtttttcgacgatataagttgccggtaccatgcctggcgcgaggttgagctgaatcaacgtggcatcggcattggcattaacgcgacaggcaaaattgctatccgcaatgagaatttgtgatttatggccgcagctcgccagagcagccagcagttgtggatggataatttcgaatttgatcatcaggaactccctgtcgggcggcgatttctggccgcccggtttgcattacatgcgataaattccgccgttaatatcgatagtggcgccggagataaatccgtcatactcgccggcaaggaaagcaatggcgcgggcgacgtcatcgggcgttcccgcgcgctgaagcggaatttgccggatggtttcgtcagccgaagcctgtgtggtgtggcggttatgaaaacgggtgccgagaataagccccggcgcaaccgcattgacgcgcacgccgtgctcgcccagttcagccgccagcgagcgtgtccaggtcaggatggccccttttgtggttgaataggcgagagaaccagcatgccccccggagcgccccgccagcgaggcgaggttaatgatgctggcgccatccgttgccgatttaagccagggaagcgccgcctgggtgacgttaagcatggtggtcatattgacgtctaacaccgtttgccagaactgacggtcaatttcgccaagccacttacgcccgacgataccgccgacgttattcaccaggatatcgataccgccgaggaattccgcggcggcctgcacgcaggcggtcgcgtcctcagtgtcaattaagtccgcatagcgccaggccgctttttgccctcgcgcgctggcgatagccgccaacttttgcgggccttcttcaccgctgtgatagtgcaaaaagacatcgcatcccgccagaatcagtttttccgccgtagcccagccgataccttgttcagagccggtgataaatgctttttttccaataagagttcccatgatgtttccttaaattttcaggattgaatgacgccttcgcgctgtttagcgcagtagaaaatgcaaatcaggccggtgatcagcaggcacatggcgaggaatatcaggcccggcgtgctgctgtggctgaagtcgttaaggaggccgaccacgtaaggggcgacgaagccgcccaggttgccgatgcagctcaccacggcgagacccgcggccgtcgctgcgcctgccgagacgttggcaggcatcgataagaaacacggtaccgcggtatagataccaatggcggcaatggtcaggaatgagagtgaaatcgcgacgttgaacttaaagaacaccaccgcgccggcgagccctaatgcggcgacgaccatactgataccggcaaaaacggcgattttgcgtgttttactggccagcatactccatggataaaccagtagcgccgccaggccgtaggggataagggcaatcaggcttacgcgaagaatatcatcgccggaaatagcggtaataatcgacggtagccacatcccgaagccgtaaatcccacacaccatcccgaaattcagcagagcataaagcaggtatttgggatttttaataccgctggcgaactcagccagcgagactttactccctgattttgaacggttcgtactactcattaaccacgccttttcttcagcgttgagatagccgacttcttgcggtgaattcttaataataaaagggatgaacaggccgataacgatcggcggaataccttcgaggataaataaccactgccaggattcaaggccaaaccagccgttatcgatatgcagaattaagcctgaaatcggtgaacccacggcgttggatagcggctggacaataatgaacatgccgagaattttggtccgccaggctggcggaaaaaagatcgtgaagtagtacaccactgaagggaagaaaccggcttcgcacacgccgagcataaaacgacagatatagagttcggtcggcgttctgacgaaccccatcaaagtggcaaatattccccaggtgatcagaatacgcgcgaaccacagccgcggaccgaacttaatcgtgccggcgttgctgggaatttcaaacataaaataaccgatgaaaaatattcccgaagcaaagccaaaggcggtggccgtcaggccaaggctatcttccagcgccattgcggcgtaggccatattattacggtcaagaaaagccagaaaataaagcaatatcattaatggaacaatatgccatgtcaatttcttaatggcgctcttttctatatcttgcgcagattgtaggttcatcattatttccggttatactcgttaaagtacaaaagaatgggatggaaatcccgacattaatatgcgttttgaatgtaatagggtataggtctccctgcagataataactattatctgcaccatgctatttatttataaaaacaactagggttgctttatttttaccgactgacgctgtatcacttccggtgcaaagataaattcgtcggtttgtaatcccggctcagtaattctctggacaagccgctcaaccatcatcgacgccattgccgaaagcggggccattaccgaggtgaggcccggtgacgataacgccgacagggagatgttatcgatgccaatcaccgaaatatcttccgctattttcaggccctgcgcgcgtagcccaaccatcaggccgatggctaaagcatcgttaatcgctaccacgccatccactcgcggcgttaaggcgctaattttttgcgccaggcttacgcccagttcgaacatctcggcgtcgccgaattcccgattgcctttgccttctatcaccacgcctctgaccgctgtaccgctttgggaaagcgcggactgaaagccgaggattttatggctgcgtcccagcgttaacccgctttcggtggcaaagacgatattacggcaaccgttgtccagcagatgttgcgccgccagacgtcccgcttcaacgttgtccattgagacactatcgaagtagcgcgcccgaggcgggacgctttcggccagccggttgtcatagctaataatggtcatgccttgttccgctgcgcgcacaaagtgggttttgcgtacgtcgctggcggcaactatcaacccgcgcacgccgtgggagaacatatccgcgataaaggctgactcctcgtcggcatcgcggcagcaaatgcctaataacagccggtggcgaaacgcgcgtgccgcagtatccagttcatgcgccagcgctgaaaagctgggattgacgatagacggtaccatcaggccgagcattttggttgctgaatcggcgaccggcggagcgcaacgcgcagggcggtaatttagctcagccatcgttttgactatccgctgtcgggtctcttcgcgcatctgttgcgtgcgattattaagtacgttggacacgctactaattgaaactccagcccgccgggcgacatcacgaatattcgccatacttaaaccttctgttttctgctgtgcgcttatttcagcgccgcggtatctgtttgctaatttatcggtgagcgaacaggcgggcaaggtatttacctcccggcaagcgaatgaaataaagcatctgtgaagcgcctcgtaaggatgggcaggtgtttagtaaacaaaggggaataaataacggcaaagggcggggataaaaaaacgggcccgatctccgggcccgttgaaataaagcgttaaattgaggttcggcgatagttgcgatattccggctgccagaaattatcgctaatggcctgcagcagcgcttcggccgatgttttcaccgccacgccctgttcctgagccactttaccgaccgcaaacgcgatagcgcgcgacacggcctgaatatctttcagttccggcagtaccgggccttcgccgttattcaccagcggcgagtggttagctaaggtttcgcttgccgccatcagcatttcgtcggtgacgcgtgatgcccccgcagcgatcacgccaaggccgatgcccgggaagatataggagttgttacactgcgcgatggcgtactgcttgcccttaaccgtcaccggggtgaacgggctgccggtggccaccagcgcttcgccgtcggtccaggtcaggatgttctgcggcgtggcttcaacgcgggaggtcgggttcgacagcggcatgacgatcggccgcgggcagtgcttgtgcatttcacgaataatttcttccgtgaacagccccggctggccggagacgccaatcaggatattcggcttcacgttacgcaccacgtcgagcagcgagagcgcttcgttggtcgtatcccaaccttgcaggttttcgcgtttctgcaccagcttgctctggaaagacagcagattcggcataccgtcagtcaacaggccgaagcggtccaccataaatacgcgttggcgggcttcttcttcgcttaacccttcgcgcatgatttgcgcgatgatctgttcagcaataccgcaaccggcggaacccgcgccgaggaagacaattttttgctcgctgagctggctgcccgcgccacggctggcggcgattaatgtaccgacggtgaccgctgcggtgccctgaatatcatcgttaaacgagcaaatctcgttacgatagcggttaagcagcggcatggcgtttttctgcgcgaaatcttcaaactgcagcagcacgtccggccagcggtttttgatggcctggataacgtcatcaacgaattgataatactcgtcgtcggtcacgcgcggatgacgccagcccatatacagcgggtcgtcgagcagttgctggttgttggtgccgacatccagcacgataggcagggtgtaggccgggctgataccgccgcaggtggtatagagcgacagcttaccgatagggatgcccatcccgccgataccctggtcgccgagaccgagaatacgctcgccgtcggtcaccacgatcactttgacgttatggttcggtacgttttgcaggatatcgtcgaggttgtgccgattctggtaggagatgaacacgccgcgcgcgcgacggtagatttccgagaaacgctcacaggcggcgccgacggtgggggtatagataaccggcatcatctcatcgagatgattgccaatcaggcgataaaacagggtttcgttggtgtcctggatgttgcgcagataaatgtgcttatcgatctcggttttaaatccctgatactggatccacgcgcgttcagcttgttcttcgatggtttcgaccacttccggcagcaggcccagcaggttgaagctgctacgctcttccatgctgaaggcgcttcctttgttgagtaacggaaactcaagcagaaccgggccagcgtaggggatataaagagagcggttttttttatagatgaattgcatcgcactaactccttgatgttcacttcagacccgggcgcggcgataagcgatcggtctggcaggaaatgcagcgggcagagtataaagcagatggtaacaaaagaaggatgcgaagcgtgggattgtcttaaaaaaacaccatcccgtttggcggatggtgtttttatcatcactcagctgaaaaattaaccaccgcggcgtttgcggcccgtagcatggatatggttaacggtagtttcttcgtcgccttcgagcaccacttttttctggcgggaaagcttgtagttcagaccgagaagatgacgtgcctgatggttcgatttcattcttactccttaatcctgttctggtttcaaggacaagcccgacgcaagccggacgaaacgtaaccctaagtacgccgcgctttttaacgcgacgggattatcgtggtccatttttttgcgaatagcaaccttgcgtcggcagattaagagcgttctcgtttcaggcgtggccgattaccacttcatttcgccggtgttcactttcgcgctcagctccagcgaactttcttcagcgagacccggatattgcgccttcatggctttgatgacgctggcggaatctttatgcgctttcagcgcctgctcgaatttctccagatagtcgcgggtaaagacgatagccttgtcgcccgccggcggcgtgccgagatagtggcccgggatcacctgttgcggatgcagcgcggccatatcgctaagggtctggcgccactgctgacggctcgccgcgctttgggtatcggcggtccagacgtgcatgccccaggcgacgccggtgccgccaagaatcgctttattcgccgggatccagacgaacgcggcgtagttctgcggctgacgaatttccactttctcgccgtcaatggtgaagctatctgcggctaatacctgtggaacatagacctgcttcggcgcgccgtctttcatctgtgggccccagtatgccagcttcgccgctttggtctcttcaatatgcttaaccacttgctcggttgccaccactttggcctgcgggaaggctttcaccagcggctcgaggccaaaatagaaatccggatcgccagaggtgatcacaatgtgcgtgagcttcttaccgcttttgttgatcatctcaaccagcttttcgccatctttaacgctgaactgggcgtcaaacagcaccgcttcgtgcgggccggaggccagcgtggagttcaccgcgaagatcgcgttctcctgcgggttgtaggtttgcagggtcaacggcgcggcaaaagcggtggtgctgaacagggcggtggcgatagccagggcagatactttcatgttggttttctctctttcaggtgaataggttcattttacgtcattcttgatttgcgaaaattcctgaaaaaagagatgctgagtttcataaaacgtgcagatggatacggatatggatcgagttatcgccgcccaggtatatatgcggatatgcgagctgggcagtttgagcgcggccgccagggcgcttggtatgtcgcggccgatggtgagtcgctatctggagcagatggaacactgggccggtacccggctcattcatcgttcgacgcgcaaactgaccttaaccagcgcaggcgaaaaggtattgcagaaaacgcgtagcctgacgcaattggcggatgagatagcggggcagacggaacgcgcggtgccgagcggcacgttgcgggtcgcctgcgcgcactttaccgccatgcagttgctctcaccgctgctaccggagtttttggcccgttacccccaactgcgcctcgaactggatatcaacaaccatccggtgagcctgattggcgagcgtatcgatgtcgccatccgaatcaccgataatccggagccgggggcgatagcgcggcggctcggcatttgccgctcggtgctctgcgcctcgccacggtggctacagcagcatggccagataaattcgccggaggagcttagtcaacataactgtctccactatagccatttcgccaccccaacatggcagtttaccgatccgcagggcgaacccgtgtcggtggccgtctccggcaacctgagcgccgggatctcctctctgctgatggaagcggcggtggcggggtgcggcatcgccatgctgccggaactggaagcccggcgcgcgctaaacagcggcgcgctgaaacaggtgctgcctggctatacgccaaaatccctggccgtctatggcatctatctgtcacgagattatcagcccagcgcgctgccgctgtttctggaggccattcagcaacagttgtcccaggtcagctagagctgtctatacttactcctttaacgtcaaaaaggagtgaaacgatggcaattcataagaaaggtcaggcgcattgggaaggggatctgaaaagcggtaaaggcaccgtctcgacggaaagcggcgcgcttaaccaacaaccttatggttttaatacccgctttgaaggcgttaaagggactaacccggaagagcttatcggcgcggcccatgccgcctgtttctcaatggcgctatcattaatgcttagcgaagagggctatacggcgacctctatcgataccgttgcggtggtcacgctggataagagcggcggcggcttcgccatcaccaagatcgcgctgcagagcaatattgtcctgccgggtatcgataaagcggcctttgatccgattatccagaaagccaaagctggctgcccggtttcgcaggtactgaaagccgacatctccctcgattatcagctcaacgcttgatccgtggcgtgcccgcgggaacgcgggcgcgttggcgtttaaagtcaccgtcggcaaatgccagccgccgcgaatggtgttatgttggtggcgttacggatagcgacgggcaacgcaatgaccagcatacgcggcatgattgaatcacaggtcctgggtttaaccgggatggcgttaaaagagattgattttgaaaacccgaagggcgagccgggcttatttggcccgcggtcggctatctggcaggtacacggcgactttacctcaatgctctgcggcggcattagcgcgctactgttacagatgctgcatccgctggcgctggccggtgtgtgggatcattcgcgttttcgcgaggatatctttggccgtctgcgccgcaccagtcaatttatctcagccaccacgtttggcgctaccgcggatgccgaaagattaatcgctaaagtgcaggggatccatcagcgcatcagcggcgttgcgccggacggcacaccctatcacgccagcgatccggcgctcttaacctgggttcacgtggccgaatgcagcagctttatggcttctcatctgcgttataagcgcaccatcgtcactgccgtccgtcaggagcagtactaccgcgaagcggcagagatcgcccggcgacttggcgccgcagacatccccgaaacgccacgtcaggtggcggagtatttgcaggatatgcgcccccagttacgttgtgatgaacgaacgcaagaagtggcgcaggtgctgctcaccacccgtctgccgggccggctaagccagccggtagggcgctggatgatggtcgccggaatcgatctgcttcccgattgggcgcagcagatgctggcgatccccatcaatccgctgcagcggcgaaccgccagagtggcggtcaatggcgtggcgtgggtacttcgcgcttcggtgcgcaatggggcttatcattgcgctatgcgtcgaatggcaacgtcataaaaataaaaaatagccactcaatgtcggctatttttaaagcgcaatcattcgcatttatatattataactcaggctatttattttaaatttattatcaacgagctattaatattgaatatcgctgattcatatcaggctatcatccatactttattcgggagggatgatggcaaataaaaatctacagaatgataataaatatcatcagcgttcacaggctgcacgtaaaagcaccctggttagcgtcgtggttaatctgtttttatcgaccgggcaaattatcgccggcctgttttcagggtcgcaagggcttattgccgatggcatccactctctttccgatttaattgctgattttgtggttctgattgccaataagaaaagccgtaaaccttccgacagcgatcatcattatggccactggcgctatgaaaatggcgcgtcgctgatattgggcgcgattttaatgattgtcggcgtcggcatgttgtggtcggcggtggataaactactccatccggaaaccattcaatccgtgcatgtaacggcattatgggtagcccttgcagcgctgatcgcaaaagagacgctgttccgttatatgctggcggtagcaaagcgcattcagtcgtcattattagttgccaacgcctggcatgcgcgctcggatgcggcgtcgtcggtagtggtggcggtggggattgttggcaacctcgccggtattgtctggttggatcctgtagcagcattgttagtaggggtattgatttcccgaatgggttacacttttgctggcgatgctttacatgatttaatggatcgttcggtcgacgcgggaacccaaaacgcaatacgtgacaccatcgccgcaacctgcggcgttgtggggctgcacgatcttaaaacccgcaaggcgggcgacctgatcctcgtcgatgtccatattgaagttccgggcgagctgtcggttcgtgcaggccatgctattgcgctggcggtgcgggaaaatgtgctcgcgcgccatgaggtgctacaggtgatgattcacattgatccctacgaagcgcccggcggtgaactggctcacgcgtaaacaactttcgactcctgcctgcaggagccaacgctaccttgccgttaattggcaataacagaggatgatatgaaaattaacgaacctcaggcgattactttaccgctgccgcgaacggcgatattcatcgtcgcgaccgtagcgcgcagcgctgagagcctgagccgcgtgcgcgactggtgcgatgattttgccgcggtggtgcgttccgttggtacccgcatgccggaggcggggatttcctgcatctgcggatttggcgctgagatctggccgcagttgtttggtcaacccaccccgcagcaactgcatcctttccgccgcgtgggcagcggagagcgcgtggcggtctctacgccgggcgatctgctgctgcatatccgttccgatgatatggggcttagcttcgagctggcgacgcagttgatggataagttgggggatgccgtaacggtcgtcgatgaagttcacggcttccgctatttcgaccgtcgggcgatgatcggtttcgttgacggtagcgaaaacccgcaggggcgcgcggcggcggatttcaccattatcggtgacgaagacccggatttcgctggtggtagctacgtgattgtgcagaaatatctgcacgatatggcgggctggaatgcgctaaccgtcgaacagcaggagcgtattatcgggcgtaaaaaaatgactaacatcgaactggatgccgacgtcaaacccagctgttcgcacagttcgctgaccacccttgaagagaacggcgaggagattaaaatcctgcgcgacaacatgccgttcggcaagcccggtatgggcgagtttggtacctattttatcggttatgcgcgcagcccggcgcccatcgaacagatgctggaaaacatgttcgtcggtcgcccggccggtaattacgatcgactgctcgattatagccgcccggttaccggcagtttgttctttgtaccttccgcgacgctacttgaagaattatccagccgccaggctgaataaccctgcataatatcggccattaagccgttactgatagtttatttctccggcctgcttgcaggccgtatattgcgtggaaaataaaaagagcccataattaaaccaccattaattcatcgctaattaatggcggttatcaacgcgatgtcgtgtttgtgtacaataaaattaaccaatggcttaatagataatatctataccctaaataattcgagttgcaggaaggcggcgacgcagggaatccccaggagcttactccagtaagtgactggggtgagcgaggaaagccaacgcacatgcaacttgaagtatgacgggtatatacccatcatttttcattagggtatgtactgagcatcattgggtcttcaggaagtaatacaatgatcatccggccagaacaacactggttttttcgtctgtttgactggcacggttccgtgctgtcaaaaattgttttccgcctgctattgaacgttctgatgtcggtcatcgccatcatcagctatcaatggtatgaacaacttggcattcacttaaccgttgcgccatttagcctgttggggatcgcgattgcgatttttctcggctttcgtaatagcgcgagctacagccgcttcgttgaggcgcgtaatttatggggaaccgtgctgattgccgaacgaaccctggtcaggcaattgaaaaatatccttcccgctgaggaggaaacgcataaaacgttagtcagttatctggtggcgttcagctggagccttaagcatcagctgcgtaaaaccgacccggcggttgacctctatcgcttgttgccgaaagaaaaagtggcggaaattctcgccagctcaatgccgactaaccgaatattattattgattggtaatgagttaggtaagctgcgcgagcagggtaagctcagcgatattacctacggcttgatggataataaactcgatgagttagcccatgttctggggggctgcgagcgtctggcgagcacgccggtgccgtttgcctacaccttgattttgcagcgtaccgtttatcttttctgcgcgttattgcccttcgcgctggtgggggatttgcattacatgacgccgtttgtttcggtgtttatctcctacaccttcctgtcctgggattccctggcggaagagctggaagatccgtttggcacctcggccaacgacctgccgctgaatgcaatgtgcaataccattgaacgtaatttgatggatatgaccgggcaacatccgttaccggaaaaaatgcagcccgaccgttattacaaccttacataaaaaaacgccgggcggggctgcccgtccggcgttgagtattagtgagtgcgcattcctgccgccgtcatcaatagcttaaagaaggtggcgaccacgccgagcgccagcacgctggccccccagataatcaccagccacatcagtttgcgccagaacggacgatgatgcgtcgttaacgttttatcagattgagtcgccatcaatgatacccctcatcgggtttgattttgccgcggaacacgtagtagctccagcaggtgtacatcaaaataaccggaatgatcagcaatccgccgaccagcataaagccctgactctgcggcggcgaagcggcctgccagattgagattgccggtggaataatattcggccagatgctgatcccaaggccgctgaacccgaggaacaccagcgccagggtgagtaaaaacggcccatagatggcctgacgattataggcgctacggacaatcccccagcagcaaaccagcaccagcaacggcaccggcataaaccagatgatattggggaaggtaaaccagcggtgagcgatttccgggtgagtcagcggcgtccagatgctgataatggcgaccactgccagcaatgccagcgtcagcgggatcgccagctcggacattttgcgatgcagtgcgccttcggttttcattatcagccaggtgcagcccagcagagcgtaggcaatcaccagcccgatgccgcaaaacagcgggaagggcgccagccagtcgagggtcgagccgctaaattcgcgacccgtgacgctgaggccgttgagcagggtgcctacggcgatcccctgactaaacgtcgccagtagcgagccgccgataaacgccttatcccacaacggacgatgttccggcgtcgccttaaagcggaattcaaacgctacgccgcggaaaatcagccccagtaacatggcggttaacgggatgctgagcgcatcgataatcaccgcgtaggccagtggaaacgcgccatacagcgccgcgccgcccagcaccatccaggtttcattgccgtcccacaccggcgccacgctattcatcatcatatcgcggtcggtttcatttttattaaacgggaacagaatgccgatcccgagatcgaaaccgtccatcacaatatacatcagggtggcaaaaacgatgatcgtgaaccagataattgacaggtcgatacccatattattttctccccgaagtattcataggttcgcgtaccgcggacagcgggcgggctggagtttggttctgagtcgggtcttctggcgtgtgcgcactttccggccctttttttatcaggcgaatcagatacacgtagccgacgccaaacaccgaggcgtagaccacgataaaggccagcaggctgagggacatatgcagatcgccatgggcggagaccgcatcccgggtgcgctgaacgccatagactacccacggctgacggccaatctcagtagtaaaccagccagccagtagcgcgaccagcccggaagggcccatcaacagggcaaaacgcaggaacggttttgaggtgtagagccggccacgccaacgcagccaggcgctgaccacgccgagcagtaccattaacataccgagcccggccatcaccctgaacgaccagaaaataatggtggaatttgggcgatcttctttcgggaaactttttaaggccggaacctgtttatcgaggctatgggtcaggatgatgctaccaagatagggaacctcaattttatatttggtgcgctcctcatccatatccggcagaccaaacagcaccaatggcgtggcttcacccggtttattctcccagtgcccttcaatcgcggcgatttttgccggttgatgttcgagcgtattcaggccgtgcgcatcgccaatcatcgcctgaatgggggcgacgatcagcgccatccacagcgccatcgagaacatcttgcggatagccggcgtgtcattgcctttcagcagatgccaggctgccgaagcgccgacgaaaaaggcgctggcaaggaaggcggcggtagacatgtgcagcaggcgatacgggaatgaagggttaaaaacgaccttcagccagtctaccggcaccacgatgccattctcgataatgtagccctggggcgtgtgcatccagctattggacgcgaggatccagaaggtggaaaacagcgtgcccagcgccaccatacaggtcgcgaagaagtgcaggccgcggccgacgcgatgccagccaaacagcatgacgccaagaaagccagcttcgaggaagaaggcggtcaggacttcataggtcaacagcggcccggtaatactaccggcgaactgcgagaacccgctccagttagtgccaaactgataggccatcaccagcccggaaacgacgcccataccaaaattaacggcaaatatttttgaccagaaatggtagagctggcggtaggtatcctcttttgtttttaaccacagcccttccagtaccgcaaggtagctggcgagaccaatggtaatggcggggaaaatgatgtggaaagatacagtaaatgcaaactgtatcctggctaaataaaaggcatctaatccgaacatggctcacccctgtacgacattacttcattgtatttatggaatattttctgcatagcggatacggctttacctgcgcaaagcctcctgttgatgacaattaaattacggcattgacgggcattgaaatatgttaatgcccttgataataaagtttaaaaataattctttaattatcaaataggttaaatttaacacccgatagataacatctattatacaacacgaaatgagatgttattatttagttaacgagtaaagttgctcatttcattttaaccagacatttagttaaagattaaaaacaacgagttaaccctgtcatttgctattcattggaaaatgaaatgcggcatttcccgcttaattaatgtggttatttaacatcgccgcaaaaaaccgtgaccaatgttgttaataacatccgttagctgaagagagtattcaggagttcatatgaataagaaaaaacgcgctgtccccggtgttcatccctatgatggcccagcgggtggatggggggcgttaaaagcgaccgccatcgccgtgcgtacgcaaatggacgcgcttgacgccccggtcacgctgctgcgtaccaaccagcctgacggttttgactgccccggctgcgcctggccggataaagaacataaatcaaccttccagttttgtgagaacggcgcgaaagcggtcacctgggaagctaccagcaaacgcgtgacgccggagttcctcgccgccaataccgtgacctcgctactggcgaaaagcgactttgaactggaaggttacggacgtattacccatcccttgtcttacgatcgcgaaagcgacacgctgcgcccggtctcctgggaaagcgcgtttgcccgcattggcgaagtattacagggcatgcagcccgatgaagttgagttctatacctccgggcgcgcctctaacgaagcggcatatctgttccagctttacgcccgcgagttcggcaccaataacttcccggactgctctaatatgtgccacgaggcaaccagcgtcggtctgccgcaatcgatcggcatcggcaaaggcacggtgtctttggacgactttgataaaaccgaactggttatttccatcggtcacaaccccggaaccaaccatccgcgcatgatgggtacgttgcatgaactgtcccgccgcggtgtgccgattatcgtctttaacccgctgcgtgaaagggcgctggaacgttttgccgacccgcagaacgttattgaaatggcaacctacagttcgacgaatatcgcctcaacctatttccaggtgaaagcgggcggcgatgccgcggcgctgaaagggatcgctaaagcattactggagatcgaagcggaccagggccaggtgctggaccaggcgtttattaacgagcacaccctcggcttcgaggcttttgccgaagatttacgtcagaccagctggccggaaattgagcgtgagtccggattaacccgcgacgatctgcagcgcgttgccgttgcctacgccaaatccaacgccactatcgtgacctatggcatggggatcacccagcataacaaaggcacctctaacgtccggttgattgccgaccttctgctgatgcgcggcaatatcggcaaaccgggggctgggatctgcccgctgcgcggtcactctaacgtgcagggcaaccgtaccgtcggcattaccgaaaaaccgagtgcggagtttctgaataacctcgaaagcgtgttcggttttgtcgctccacgcggacatggccacgatgcggtgaaagcgctgcaggcaatggttgccggcgacgcgaaagcgctgatctgtcttggcggtaatttcgcggtggcgatgccggatcatgaacgggcgttcccggcgatgcgcgggctggatcttagtgtgcacatcggcaccaaactgaatcgttcgcatctgctggtggcgaaagagacttttattctgccttgtctgggccgtaccgaactcgatatgcaggagagcggacgccagtcgattaccgtggaagactcgatgtcgatggtccacgcctcatccggcaaactgaaaccggcctctgaccggctgcgctcggaaccggctattgtcgccgggatggcggcggcgacgctgccgaacagtaagatcgactggttatcgctggtggctgattacgaccgcatccgcgatctcatcgagcagactatccccgggttcgaggattataacgaacgtattcgtcatccgggcggtttccgtatgccgctgccgccaaccgagcggatctggccgacgccgaccggcaaagcgatgttctcggtattcaaaggcgtccatgagaattcccgcgttgacggcgacgacgtgatgcgcctggttacgctgcgcagtcacgatcagtacaacaccacgatttacgcgatggacgatcgctatcgcggagtgtttggccgccgcgatgtgctgtttatgaatgagcaggatatggccgagcaggggctggagcatggcgaccgcgtcgatatttttaccgcgctgccggatagcgatctgcgccttgaggatatcaccgtggttgcttacagcatcgcgccgggcaccgtgggcgcctattacccggaagctaacgttctggtgccgctggattacatcgatgaagagagcggcacgccgtcgtacaaatcagttcctatccgcctgacgctgcgttcgaaagaggtgcgcgccgtccccggtctgcgttaatttgctgaatattgccagtggcctgcgatcgggccactggcaaatggcatcttgaaatcagcccctaccgcaagtaacatttaaataacatatcttatcgcagctgtgttctgcatcgcgtccaccactgacccgcggacgtcactattctggaagttaagatggacattaaacagctgaaatatctgatcgcgctcgatcagacgcgccatttcggccaggccgcggcggcctgccatatcacccaaccgacgctttcaatgcgcattcgcaacctggaagacgaacttaatctcacgctgattcagcgcggccaacgcttcgaaggcttcaccccggaaggggaacgcatcctcgcctgggcgcgggcgctgctggcggcgcacgatggcctggcggctgaagcggcgatttgtcgcggccagatggtgggccagttacgcgtaggcatggtgccgttagccagcttgaacccgatgcaattgatcaaaccgctggcggaaaaatacccagaactgcagttcagtctgctgtcgatgacctctgagcaaattattgacggcgtcagccgtaaccagctcgatctaggcatctgctatttgcaccacgtcgatagcgcattatttaacgtcacctggctgccgaaaacgcgaatgggcctgctgcacgacagtcgccatttccagtttgacgcaggcatacccgagtgggagacattagcggggctgccgctcggtttccttaccaagggaatgtattatcgtgaatcgattgaaatgagctttaaagccaaagggttaacgccgaaatatgtctttgaaagcgattcgacatttcagataatccaggcggtacaggccgggatctgttgcgccatcatgccgctcaataacggcctggaagcgctgagcgacaatctggcgattatgcctattggggaaaccgaggttgattccacgcttgcgcttatcatgcgcaaccaggagccggtgtcgtcgttggcggaaaaatgtttcgccgatgcgcagatgatttttggcgaagcgccgcaaatttaattggcggccaaatgctgctgcatgaaatcgagccagacgcgagagcgggcaggtaaaaagtggcgttcgcgatacagcgccactaaatgtagcggtgccggcggtagctccagttcaaccacctttaactgacctgaggcgataaacgggcggcaagcctgttcagcgaggatggcgaaacctacgccggcgacggcggcatgaagggcgatctctccgctattcacccgaaaatgagcctggacgttcacttttttaaacgcgtttcgtgcggtgataaattgccaggcttgccccttcagcgcgctgacggtggtgatgcagggaagtgaggcaagctgctcgcaacgtactggctgtccgcatttttccagcagcgaaggcgcagcgacaacacaacagggaaatgtcgccaacggcatggcgatatagctggcatcctccattttgcctcggacgatggcgacggcaatgtcgatatcttctttaagcgcgtcggctccggcaaggctgaccacacagcttacttcgattttgggataacgcatggcgaactgcgccagcatggggccaaaaagcgtcggtccaatctcgttgggaagacataagcgcaacagcccctcaggatcggcctgctgttgagttaaggccgcttcggttgccgcgagctgatcaagcagggggcgcatactattaaaaaaagcctgcccggcatcggtgagatgcatgtgtctggtgctgcgctggataaggcgcaattgcagtttttcttccagttgagaaatctggcgactgacatttgacgaaggcatacgtaatgcccgcgccgccccgctgaagctgccgttttccacgacattcacaaacacgcgtagtgcattcaaatccagtttactcaccgctgattatcccatttttgataattaacccgcccatttttaccgacttatgcgtttttttactagccgataaactgacgctccccctgatgagaggaagtgtaatgaccataaatctacggcgaatgggcgcgatcatcgcttttatccaatttaccaacgcgctcgaatatatgatttttaatccgctatttgtctacatggcgccaacttttcaggtgccggtgagctgggcaggttatgtcagcggtatttatacgcttgcgtcggtcatttctggaatcggcgcgtggcgcctggtgggaaagctaaatccgcgtaagtttctactggttaatatggccttactgggagcattaacgctgatggttctggctacccagcacttcatattgttgctgatactgcgttttttggccgggctcctcggcggaatgacgatgggggtggccagcagtttactgatcaacgcggcggaccaggaacaccgcgcgcgattgttggcaacggtcatctctgccttttcgctggtcagtattatcggcatgcccggcatgttgtttctctgcgaacgtttcggctggcagacggcgccggcattgattggcgttctctgcctgctggcgctcatcatgatctatgttggcctgccgaaggcttccggcggcgctggctctggtacaaagatacgcatcacgccaacgatgctgttatttgccagcggcaatgcgttaacccagtttagcccgatgctattactgccgatcctggtgcctttgctgctgggcaatatgcgggcaagcagcgaggcgctaccgtggttattctttctcggcggtatggcgggattcgcggcgacaaagttgagcggcagcctgtgtcaacgctttggcggctatcggctgagcctggcggcaaccgcagtttttatcatcagtttgctgatggtgctgtggctggacggcgcgagttggttgtttatgattaccttccttggggcatcttatagccggctggttgcctcctcggcggtggcgattcgtttcccggacgataactggcgcgcgggatttaccactctgcaaggcggtgtcatgtcattcagtacggcactcgcttttatgctctgctcactgtggctggccgacggcgagatgagtcagcaggcgtctacggggttgattgcatttagcggcgctagcgccttgctgctgccatgtttactgcgctatcaagaaaaaatactcgtacgcaacgccgccgaacgggcaaccggcggcgttggtgagctttaaatattctccagacgaataccccgggttcttggcccaaatatgcctaccgacagcatgaccatcagcatactggcgacgataaagctaatcacgcccggcgttccggcatattgcaggatcacgccaatcataatgctggtaaccgcggtggacagacggctaaaggagtaacagaagcccaccgcccgggcgcggatgtgggtagggaacacctccgcctgataggcgtgatagctgatggtgagccaggcattggaccaggtgatcataaagccgcagataaccagcagtaccggactattttgtaaagcgaacagtgtgccgaagatcaccgtcatcagcgctgacagaacaatttgccatttgttttcaaaacgatggacaaagcgagtacagaacaggcagccaagcgggtaggcaagggtgataaaaaaagcgtacagcaggctatgggtaatactggcgccctggccggagagcagcgcgggcagccagttaccgaaaccaaagaagccgatggcctggaaaaagttcatcaccattaacatgagggtgcgttgacggtactgcggcgcccaaatctctttaaaattgctgcgttgcggcaccgctaccgcctgactggcatggcgccgggaaggcgataaaccgcagcgttgttccatttcacccataacccggtgcgcgtcatcgtggcgacctttgctttccagccagcgggcggattccggcagctttttgcggataacccaaatgaccagtgaacacagtgcgccgagaataatcacccaacgccagccgctcaggccgagaatggtcattggcaccagtagccaggacatcagcgccaccgtcggtaccgagagaaactgaataaagaaggcgtaagcgaaggctttattacgtaagtgcgtcggcatccattcactgagataagtatcgatagtcaccagttcaattcccaggccgatccccaccaggaaacgaaagaaaataaccccttcagcgctattttgcagcgccataatcagcgaaaagatgccataccacgccagcgcgaacataaaggtcaggcggcgtccaagtctgtccgccagcggcgcgagcaaactggcgccgataaacagccccataaaggtcgaggaagcgaaggctgcctgatcggcaataccaaataccccatctttcccggtatggaaaataccctcggcgagcaggccggtgctgatataaccggtctggaacaggtcgtagagttcgaaaaagccgcctaatgccagtagggtgataaaggaccaaagaccgggggaggagggcagagcgtcgatacgcgcggttaagctatcgggatgttgtcctggcgggctaaaggaggcgtcgccgagaacctgggtagtagacatattattattttcctcaggagaaatgtttgcctgctaatgttaattggttgttaatggttttaaatttttaattgtgagcggtgtggcgatttaacagtcggaaatcatgtttaatacgctgatagatgataaatatgctgcttttttgtcagcacagacggcagaattgaagtaaacgaccagcagcgatcaatcagactaagagaaatggtgacttcggtgaaaatcacctacatttgcagtgtgtatctatgtctaccagggaaaagaatatgttaaagcgtcaggcaataaaaacggcgttggcaatggtgatgtcggtaacgatggccgcggcaccggcgcttgctaatcccgggaacggtaatggcaatggtgaacatggcaatagcggtaaaaacatctatcatggcaataaaggtaatcatggtcatagcgccagccaaagcgataacggcggcggcaagggccagcgtaagaattacggcaaaccggatcacgtcgatagtgatatcagctataccaccgctcgcgcgctagcggtgaactacggcttgaccggctataaagcgctgcctccggggattgcgaaaaatctcgcgcgtggaaaaccattacctccgggcattgccaaaaaaacggtgcctgcctcgatgctcaaccaattaccttattatcctggctatgagtggcgggtagtgggtgacgatctggttctgattgcgctcagtaccgccgtggtcaccgcgatcattaatagcgtctttgattaacatagaggccccgtgataaacggggctttgtttttctaataacatttgatctctttcttaaaccaatcctcaccggggagagtattaaactttacagctattattggcgggctatactaagcacaactttatacaggagagatatgttggacagtcacccttatttaaacatcaaggcaaactgacgctatctattctgcgctgtttgccaaccggcaggcagcaatcctttcccaatcctgattgcctcctgagaactggaattcgcttttttgcgaggtaattcatcatgctattatttttgtacgccctgttccctccgccttttacgcggtaacacacgctcacacaggccattaaggctatctcactgcggttaatcaatctacgcaggaatatctactacgcgcaatttgtgagtgtaaaaaaataacatctaactatgcatgatttatttatgcagggattaccacatctaaatttggggatgaatcatgactgacatgaaagtagaaaaccggaataccaaccggtctgcgtcagaaaatgataagcagcataaaaagagctttgcgattgaaacggaggcctttaatagtccggaccatacgttggcacgtttaaatagcagtcggcagggactaacgaccgccgatgcactggaacggctggacgactatggtcgcaacgaagtggcacgcgaaagtgtgccgccgttttttattcaattactgcaggcatttaataacccgtttatttacgtactgatggcgctggcggcagtcagctttattaccgattactggctaccgctgcgaaacggtgaggagacagacctcaccggcgttattattatcctgacgatggtgagcctgagtggtctattacgcttctggcaggaattcaggaccaataaagccgcgcaggcgctgaaatccatggtccgtaccaccgcaacggtactgcgccgcgggccgggcaatattggccccagccaggaggaaatacccattgaagagctggtgccgggcgatattattttccttgccgcaggcgatctggtgccggcagatgttcgtctgctggaatcacgggacctctttgtcagtcagtccattcttagcggtgaatcactaccggtagaaaaatatgatctgatggccagcgtgtcgggaaaatgcagcgaccgtctaccgacgccggataaaaataaaagtctgttagagatgggcaatgtctgtctgatggggacgaacgtcaccagcggcagggcgcaggcggtggtggtggcgaccggcgaccggacctggtttggctcgctggcaaaatcgatcgtcggcactcgcacgcaaaccgccttcgatcgcggggtgaatagcgtcagctggttgttaatccgcttcatgctgatcatggtaccgatcgtgttgttgattaacggtttcagtaaaggcgattgggtagaagcctcgctttttgccctggcggtggcggtcggtttaacgccggagatgttacccatgatcgtcagttcgaacctcgcgaagggcgcgattgccatgtcgcggcgtaaggtgatcgttaagcgtctcaatgccattcaaaaccttggcgcaatggatgtgctgtgtacggataaaacaggcaccctgacccaggacaatatcatccttgagcatcatctcgacgttggcggcgcggaaagcaatcgagtattaatgctggcgtggctgaatagcagcagccaaagcggagcgcgcaatctgatggacagagccgtgttgcgctatggggaagggcggctggcgccggcggaaaaagagcgtttcgtgaagctcgatgaattgccgttcgattttgtacgccgccgcgtatcggtctcggtggaagacagccgctatggcgataaaagcctgatttgtaaaggggcggttgaagagatgctcgaagccgcgacccatattcgtgagggcgacaagatcgttgaactggacgcgctgcgccgggaactattgctgacgaaaaccgaagattataacgctcagggttttcgggtattgctggtcgctacccgcaagctggatgatgccgcgctaaacgtgccgctcaccgccgctgatgaacaggggctcaccgtcgagggcatgttgacgttcctcgacccgccgaaggaaagcgcgggcaaagccattaccgcactgcgtgataacggtgtcgcggtcaaggtacttaccggtgataacccggttgtaacggcgcggatttgtcttgaagtgggcattgatgcgcacgacatactcaccggccaacaggttgagtcaatgactgaccgccagcttcagcaggaggtcgagaaacgcgcggtgttcgccaaactgacgccgctgcagaagtcgcgcattctgcagatgctacagaaaaatggccataccgttggttttctgggcgatggcattaacgacgccccggcgctgcgcgatgccgatgtgggtatttctgtcgatagcgcggcggatatcgcgaaggagtcctcggatattattctgctggaaaaagacctgatggtgctggaagagggggtgattaaaggacgcgagacctttggcaacattattaagtatctgaacatggccgccagctccaacttcggcaacgtgttttcggtattagtcgccagcgcgtttatcccgttcctgccgatgctggcgattcatctgttgattcagaatctgatgtacgacatctcacagctgtcgctgccgtgggacaaaatggataaggagtttttgcgtaagccgcgcaagtgggatgcgaagaacattggccgctttatgctgtggattggccccacgtcgtcgatattcgatatcaccacctttgctctgatgtggtacgtcttcgccgccaatcatgtggaagcgcaggccttgttccagtccggctggtttatcgaagggctgctgtcgcagacgctggtggtgcatatgttgagaacgcagaaaattccgttcattcagagccgcgcgacgctgccggttttgctcaccaccgccgcgattatggccatcggcatctatatcccgttctcgccgcttggcgccatggtggggcttgagccgctgccgctgagttatttcccgtggctcgttgccacgttgctgagctactgcctggtggcgcagggtatgaaacgtttctatatcaagcgctttggccagtggttttgatgacaaaaaggaggatgacgatgaatcgttcaccggaggatctcatcgcctggatgtttttactggccggtttgctggtactggcgctggcgatacggcaaatctttgaatagcggggggactatgcgcaaaacgtcgttagacccaatctttctccaggccgtgttgatgatggtggtgatagtcttactcaccgtctggattaggtagtttaaggcccggggctttatcgctccgggcctaaagtccctgcggtattcctgcaacatggcaaatggtactttccaccacggggaacacgtcgattaactcaataatggtagagcttcgagcatattcttcaggtttaaggtatcccagggcaggtgttcggcgacggtgaggccgaccggtttggcctgagcggcggcttgattgataagattaaccacttcggcaatcgtcagtttcccttcggcgacatcgccaaaatcgtgtacgccgcgccccggacgagcaaatagcactgctcgaaacagggccgggtcgaggacatcaagatcgagatggatggccaggtactcaatacgttcacgcgctatccactcgtcaatcgcctgcggattctgacgcagctctgatgggcttaaggtggcgatgccgcgttcactaataaactgtttttcgacatcgagcgggctatggatcccggcaatgagcgctttgccaggtgataatggctttctgaccacctgggttaattccgcgtcgccattgcccattaaagccccaagaacgtgggcatgggcatgtgggaactgctctggcgtcataacgtccgggtgagaatcaatccataatacccccaatttatcgccatatttttccacaagccaggcgaaaggagccagggagaccaggcaatcgccccctaaggtgacaatggtctctggctgatttcgagtgattttgtcttgtgcatcaagcaactgttcaacgatcgcccggcggccgacaattccatcttcatttgccagttgagcgtgtcctggttcggggacacagacctcctcgacaacgccttgcgcaggcggcgccagccaggacagcatccgggagccgaagaagtagggcggattgttgccgccttgccattgcggaaaaagcaaacgcagactggattgggtatttggcatcatggttctcctcatatttatcatcacaaatgaacgaacgttcattcattaataatgaggcgcactgtcggtgatggcaagtaaaaacgggttatttaccctaacattaggctgctagccaaaaagcgcttgaagcaggtagaattgcccatcgccggaggtagttgaaatgttaaataattcagaaacgtaccataagctgattgtcgccgcggcggcgtgctttgccgaaaaaggatttaatggaaccagcgtgcgcgaaattgcactgcgcgcaggtattagcctcggcgcgatgtacacctacttcaaaggcaaagatgaactcattgaggcgattatccttgaagagcaaaaatcggcattagctaagcatcaggagcgcttcgaaggttcccattttgcgcagatttgcgccttagccgtttcctgtatagaagaagtggggtatccctcttcgcaccagctgtgggtggaaattattgcggaatcggcaagaaagccggcgctgcggcagattttcgtcaatagcgacaggatcatgcgcgacggaatggcacagattattgctcaaggaattgccgcaggcgagctcagcccacacgttaacgtcgaagaagcaacgctcaccatctttgcattcatcgatggtctgattggccgtaaagcgatgaatcccgcatttaccgtggctaaggatctgccgcattttgacaacgtcatggcgaccattctcaataaaaatagcgctagtgaatcccatgccacagtacgctgatttctgttttagcgccgtgatggctcaacgggcggcaaaagaaaatctcacccttgatgccgaccagctcgcgttggttgccaacttgcaaacgctgagccatcagttattccggcagcaaacggcaatacaaggattgtacgtctgggggcgaaccgggcgtgggaagagctttattctcgatagtttctttgccagcttgccgctgcgtgaaaagcggcgggtgcattttcatcactttttccgcgaactccatcagcggctgaacgccccttcggcgccgcggttgcaagaggtcgtcgcgcaaatgaccgacaactgtcgtctgctctgttttgatgagtttcatcttcatgacccggctgatgcgatgttgataaaggtgctactggagcatttgttcgcgcgaaatatcgtcttattagcgacctccaattatccccccgaccgtttgctggcgaatccgctctatcacgaacgttttttgccttccattaacctcattaaacgtcatatgacggtaacggcgctcaacggcgaacaggattaccgcgagcgacatgcctcgctggagaatgatttctgccagggaaaactgttggtgcagccaacccccagtactcgcgcggcgctcggtttgccggctattgccgcgcaggcgcaggctctgcaagtaggttatcgaaccctgcaaacggcatcgccgcaaggtacctttctgcatttcactttcgaccagctctgccttgcgcctacctcggtcatggattacctgacgctatgtgagcaacaccagaactggctcgtcgagaaggttccaccgttggcgcgagttagccctgcggcacagcagcgctttatcaacgtggtggatattttgtatgaaaaacagtgccgcttaattttaattaccgattgcgggctggaaacactggtggcggatgtggagctggatgatattcaacgcacctacagtcggttacagcagctcgctcgggaagcataaaaaagcgccactcgataatgagcggcgctttaacagagtaacctgccgccggttattcaccggcgggcaggggaattacagatcgaaacgatccagattcattaccttggtccatgcggcaacgaaatcagtaacgaatttctgttgcgcatcggcacaggcatagacttcggccagcgcgcgcaggaccgagttagaaccgaacaccagatcgacgcgagtggcggtatatttctcttcgccgctcttacggtcgtgaccggtaaacagctcagcctgttcatccgcggctttccatacggtgcccatatccagcaggttgacgaagaagtcagtgctgaggacgccgacgcgatcggtgaagacgccatgttggctgccatcgaagttagcgcccagcacgcgcaggccgccgaccagcgccgtcatttccggcgccgtcagggttagctgctgcgctttatcgataagcagggtttccgttgatacgccgccttcgatgcgacggtaattacggaaaccgtcggccagcggctgcagcagatccattgcttcaacatcggtctgatcctggcgcgcatctacgcgacccggcgcaaacggcacgtttacttgaacgccggcagccgctgcggcctgctcaacccccacaacgcccgccagaacaatgatatccgccagagacgctttacccgatgctttctggatggcctgtagcgttggcagcactttgctggcaatggcgttgaccggccattctctctgtggcagcagggccagacgcgcgccgttagcgccgccgcgtttatcaccgccgcggaaggttgaggcggaagcccaggcaacggagaccagttcgctgaccgacaggcctgaatccgcaatggccgttttcagcgtagcgatgtcggaggcggtcgggttatgcgtcggagccggtaatggatcctgccaaatcagatcttcttttggcacttccggaccgagataacgggattttggccccatatcgcggtgaattagtttgaaccaggcgcgggcgaaggcttcgttaaaggcctgcggatcgttcaggaaacggcgcgagattttgccgaattccgggtcgaagcgcagcgtcaggtccgttaccagcatggtcggcttgcgttttttattcggatcaaacgggtcgggaataatctccggcgcatctttcgcttcaaactgaatagcgcccgccgggctgcgcgtctgtacccattcgtatttgaacaggttctcgaagaagtagttgctccattgggtcggggtttgcgtccatacgacttccagacccgaggtgatggcgtccgcgcctacaccgctgccgtaagtactgctccagccaagaccctgagattccagcggggcggcttccggttccgggccaacgtggcttgccggtgcggcgccgtgcgttttacccagcgtatggccgccggcgatcagcgcgacgatttcttcatcgtccatcgccatattgccgaaggtcgcacgaatggctgccgcggcggaaagcggatcgccgctggcgttagggccttccgggttgacatagatgagacccatttcggtggcgcccagcgcctgtttttccaggctttccgggtggcgatgtttcagccactctttttcatcgccccagtcaacatcgaggtccggttcccacacgtcttcacggcctgcgccgaaaccgaaggtacggaagccggcgttttctaatgccacgttacctgccagcatatacaggtcggcccaggagattttctgaccatatttttgtttcaccggccacagcagacgacgggctttatcaaggctgacgttatccggccaggagttaagcggggcgaagcgctgctgcccgcgacccgcgccgccgcggccatcgacggtacggtaagtccccgcgccgtgccacgccatacgaataaacaggccaatgtagctgccccaatcggcaggccaccactcctgagagtcggtcagtagcgcgcgaaggtcggctttcaatgcggagtagtcgagctttttgaactcttcccgatagttgaagttttcacccaacgggttagaacgattggagtgctgattcagcaggtcaacacgaagttggttgggccaccagtcacggttggcggtaccgctgccggcgctttgcttcggcgtcccggcgtggaaagggcatttccctgcggatgggttgttagtgggatcatttgacgtgctcatatcaggctccgtttgcttttgtgaatgccattacgatatacactgctaccaataagcgatatttgaatgagtctacggatttaatagcttttaccgttcaataaacataattaaaaccagtgttttagtgtgtttactcggcgaaattcaaaaccacacctttaaacatagtcgtaacgcagcggtaaaggaaacgttatgatgcgttaaccgctacggatcgctaattgtttgagatatgacaattttactgcgatgaaaggattagcgttgccagtaaagcggcgtgccgaaaacgtcggtaaaataatcaataacggtgcgtacattgagcgacggatgacgagcatgcggataaatcgcggcaatgtaagagggcaaatggttaatgccaacgctgtagtcattcatcagcgctactaatgttccctgcgccagcgcgtcgctcaccatccagtccggaaacaaaacaatgcccattccgccaatcgctgaagtgagaagggcatcggcgttgtttgagattagccgcggtgtttgcgggtaatggatccactcttcttctctctggcgaaaaagccaacggttagcaccctgtgaaccgcgatacaccagcgtgcggtgttgattaagctcagaaggcgattgcggcgcgccgaaacgggaaaggtaaccaggcgctgcggcgaggtaatagcgctgggcgccaaaaacctttgcgtgatagctggcgtcaggcagggcgctgatgcgaaaaatgatatcagtcgcctggcgatgaggatcgacaaagtcatcggtcaggattaattcgtactccagctcgggataacgatcggccagtcccgctaaccatggcgcgatatgccgttggccaaagtagaccggggcgttgatgcgcacgagtccgccaggttgttgggcgcgatcctgtaattcgcgttgcgcgtgagcgaattgctcggtcatcccgcgggcatagtcagcaaacaggtttccggcctccgttggaacgaccgcacgggtattgcggtagaacagctgctggccaagcgcatcctcaagttgctggatgactcgtgaaatcagagaaggagaaacgccttcacggcgcgcgacaacggaaaaactatggctgtcatacacggcgataaacagctggagggcgcggagattgatgttacctacgtcggccattaatgcaaatcctgcaaaggtgtttgcaaaactatactattttttgcattagcgcgccgttctattctcttccgctcttaacaactgaagagtatttaacatgcagcgtgtgctgatttttttagtgattgccggcggaatggggctgtccgtagaggcaggtctattggggccgctggcgggtcaggtcggtgatttatgggcaacaatgagtattttcgccattggcgcggcattaacgtttttactgatgattttttttagcccgcgacagagtccctcttttttttcgctccccggttggcaattaaccggtggtctattggggccaggttatgtgctgatattaacgattgttactccgacgatcggtatcgcaatgacgattaccggtgttctcgccggtcaagtatgtaagagtctgttaatcgatcattttggctggtttggtagcccgcggcgaaaaatagatcgccgccgggttattgcgctgttgttcatcgtggcggcattagtgctgattgccgttgattgaggtgctgatatgaatatgttgatgattattttgtcgctaattggcggcgcattgctaagcgtacaggctgcggtgaatggccgtcttggcgcgcaagtcggaatattgcgtagcgcctttttgaccttttccattggcgcattggtgaccggtttattcatcgttttctttgctccgcagcagtcgatgacgctgctggatgtgccaaagtggcaactgcttggggcgttctgcggggtaccctatattgtcatcatggtgctggcagtacagcgaatcggcacggcaacggcgacggtggcggtaatatttggtcaactcgcgatgagcttgctgattgataatttcgggtggttgggaaatagcgctattgccttttcgccacaacgcctggcagcggtgctgtgtttggcgttagcactgtactttatatacgcctctggcgtatcaggagcagttgcacctcctaaacagccgggaaaggcgaaatggttgtcgaccgaacgggaataagctaatacttagacaccatgtgactggcgctaaagacagaatactgttggggagcatggtcaagtacgccgcgcgcctgggcattacccctatctggagataagttatgcctgaattagcttcattatcggcttttgccgcggtggcgttggggttggtgttaacgcctggccccaacatgatgtacctcacttcgcggtcgatttgccagggaaaacgcgccggctttatatcccttgctggcgttgcggtggggtttttcttttatatgctgtgcgcggcttttggcataaccgcgctggttttcgccgtaccctatgcctacgatgcgttgcgaatttgcggagtggcttatttactctatttagcgtggcaggcgattaaacccggtgggcggccgattttcgcggtgcgcgacttaccggctgatagcgggcgtaagctgtttctgatgggctttcttaccagcctggcgaatcctaaagtggctatcttgtatttgtctttgctgccgcagtttatcacccccggactcggtagcgtgctgagtcagtccctaatactaggctgcacccaggcgctaataagcgtggcggttaacgggcttattattatgctggccgggcaggtggcgctgtttcttgggcggcgaccgggctggcaacactttcagcgttggctgatggcgacggtacttgccggaatggcggtaaagatcgcttttgaggccagaaaataatcgttaccgcctgacaacgcgttcttgtgcctttctctcgttgagaaaggcaactcacgttctaacatactgatacatttctgccagttcattagcaacctttcagtagggctaatgcgtcaataaagctattcttccccgccttaagtttttgtgctttccagtgacgcaggtaaattgccgccaatggccctattgagagatgagatccgcgaccactcggcagaagagatgctgtttatccgccgcgccgttattgctttcctgttggtggtggtctgctttggggtgttgattttcaatctctaccatctccaggtagagcagcacgacttttatcagacccgctccaatcaaaatgacattaaaatgttgccgatcgcgccaagccgggggctgattttcgaccgcaacggtattccgctggtacaaaatatcaccctgtatcgcctgcaggtgatccccagcaagattgccgatatgtcggcgctgctgcaggcgttaagcccgattgtcgacctgacggcggatgatatcgccagtttccgcgacgatatgcaccacaatagccgctataaagaagtgacgctgaaatccgatcttaccgatgtggaagtggcgcgattcgcggtcaacgaattccgttttcccggcgtcaccgtcgagagctaccagcagcgaagttatccctatggcgcggaactggcgcacgttgtcggttacgtttcgaaaattaacgataacgatttacaacggctggcgaaaaacggcgaagcagaaaactacgcggccgatcgcaatatcggtaaacaggggattgaaggctattacgagaaagagctgcatggcaccaccggttatcaggaagtcgaggtagacaaccacggtcgcgtcgttcgcctgttgaaagaagtcccgccggtcgccggcaaaaatatctatctgacgctagacctgcatttgcagcagtacatcgagtcggtcctgaagggccagcgcgccgcggtcgtggccgtcgacccgcgcgacggcggcgtactggcaatggtctccagccccagctatgaccccaaccccttcgttaaggggattggctaccaggcttacaaatcgctgctcgataaccaggatcgcccgctgattaaccgcgtcactcagggcttgtatcccccggcttccacggtcaagccgtatatggcgctctcagccctttccgccggggtgattacgccaaataccaccttcttcggcgcgccgacctggacgctacccggtactcagcgccgctatcgcgactggttaaaaacgggacatggtatgttgaatgtgaccaaagcgattgaagagtcggcggataccttcttctaccaggtcgcttttgagatgggcatcgaccgtatacacgagtggttgagcaagtttggttacggacaatcgaccggcatcgatctcaatgaagaatacgccggggttttgccgagccgcgaatggaaacagcgggtacataaaaaaccgtggtatcagggcgatacgatttccgtcggtatcggccaggggtactggatcgcgacgccaatccagatggtgaaagcgctgaccactttaatcaacaacggcaaagtacaaaacccccatcttttgtactcaatgaagcaggggaataaggtcgtacggtaccagcagccagccaatttaccgcaggtcggcgatccgaaatcgccatactggggggttgttcgcaatggtatgtatggcatggcgaacctgccgaacggtacgggatataagctgtttcataccgcgccgtaccagattgcggcgaagtccggcacctcgcaggtgtttagcctgaaggagaaccagacctacaatgccaaaatgatcccggtacgtctgcgcgaccacattttttataccctgtttgcgccgtatcagcatccgaaagtggcgatggcgctcattctcgaaaatggcggcggcgatggcgttgtcgccggcccgacggcgcgtgcgattctcgaccatatcttcgacccggcgaatgcgccggctgcggatagcgcgcaaagtaacgttccgcaggtcgaaagcgccgatgcgcagtaaccactttaagtggcggacgtcgtcggcgcgctatacaggattcgccagctgcggcgacggcgagttatctcacgccatagcgcgatgagctcgtccagctgtaggtcgttaacgttctgcggcgtggctaccggtagatgatagcgctggcgcagggcggagagtgcggtggcgctggcgtcctgcgcctgaccgttctgctcagccaactgttgttgtaactggctgaactcagcttgcccacacagcgttaactggcggagaaaggttttacagcagcgtagcaggttactgatggaacgatctggcgattgcagcgccagcagcaggccattgcgatcggcgatccgctgataacggcagctcaccacgtagccaatctgctgttcgacccgcagacgctggaagaattgcggctcgcaaagtagcgccagcagttgcagcgcggccagcgacgcgccttcaggcaatggaataaaaaccagtagcgcgttatccgagctggcgtgaggaatacgctgaataccgcggcgacagcccaccgaagagtgaagttcggcgttgaccggggtattgagcagcgtcaattgacgggcaacctgctgcgccagattaccgctgccgcccaccatcgccgccagccaaccctcttgcgccggggtgatagtcagatgttcaggtaattgttgcagaagctggcgaatcgcaatggtttcagacgcgaacgtcgtccccggagcgggttgggctaatcggcgcataagtgcggtgacgacgcgctccgctacgccgccggattccggtagctgtagggtaagctgccagttgccgtccaccgtttgccactcgccgctgccgccagcatggcgaagttgcgcgagcaagggacggagctgctggcttatcgccatcccctgcgcctgactaagcacgctatagaatggcttgcgaacgatcagcgttggcgtttgattatctgcaatgacatgcagcagcgggctggtcgttggcggcaggtcaggcgctgccgcggtcgccgcctgcggatagaagctaaatgccagcggatcaatcacgactgtccgtggctgcctacggccgagcggcaaggtaaagccctgggttgccacgccatcgccagccgctattttgcggcacaccagcgaagaggctggcgccgtcagcaagctggcgcagaaacgggcaaagtcgatgggcggggaatcgggcgcaaaacccaatgcccgctgacgtaactgttcgagcggggtgagtgcgttaaaacgccgctgcgccagcctgtaatagtgcaactgctgttcaggcgaggtgtggcgcaatgcctgcagccatcgctcgagatgctgctggatggcgtcgggatggtcgctgctgaataccagcgccagccagccgacacgttcatcctggtaaagccagttcagcgcgacatcgtccgcgagcccgcattcacgtagcccggccagcaggctgccgggcgcttcatccagtaagaattcacgaaaagtagtgacgttgtcacttactgcaatgagcggacaacgccataccgccggttggtcttcaacggccagttgaagatccacattgttgctaaaatacgcagacggcgggctttccggcggcaggccgccagggaatcccgcggcaaaaaaatgggccaatgcggctaattcatcaagcgactgcggcccctgaagccatagctgcagatggctggcgacataatagcgctgatgaaactcgccgagcgcaacctgcagcgcaggcaagtttccgcccagagaatccatgctgccgacctgaaaacggcgaaaagccgcgggcgccgctatcgcgtgacgggctgcggcttcacggcgggagggatcgtgctgctggataagccggttttccgcatcgatgaccgccagttcctgacggatatcttcaggcgacagcagcggcgcctggagcgtatcccgtagacgggtgatgccctcggccagactactggcggcgacctcgaagaaataggcgctgtggcgggcaagggtggtggcgttgacgctgccgccctggcgttggatccacgccattaatcgctcgtctgcgtgatagcgctggctgccgcgaaacagcaaatgttccagtaaatgggccagccccggcagggcatcggtttcgtgatggcttccggcacccaccttaaccaacgccgcagcacgcgtcgcctgcggctgatgaaccagcgttgcgcgaatcccgcctgccagttccacgatgcgggtggcggtggtcatcacaattcccgggttttatagatcagctgtgaacgggtgcggttacggaactgcagctggctgattttgatgtcgctacaggccgcttcgcgccgcgcttcaaggattttatggtggtgcggcgatttgctgcacaccgggtcagcgttatcggcattgccggtcagcataaaggcctgacagcggcagccgccgaaatctttctctttttcatcacaggaacggcacggctccggcatccagtcgaagccgcggtagcggttgaagccaaacgagtcataccagatcgattccaggctctgctccagcaccgatgggaactcgaccggtaactggcgcgcgctgtgacacggcagcgcggtgccttccggggtcacgctgaggaatatcgagccccagccgcccatacagcctttagggcgttcttcgtagtagtccggggtgacaaagagcagattggtcagattaccgttagccgccattttatggcggtaatcagcaacgacctgttcagctcgggcgatctgttcgcgggtcggcagtaacccctgacgattgaggaacgcccagccgtaaaactggcaggtggcgagctcaacatcatccgcttccagctcgatacacagatcgatgattttatcgatctggtcgatattgtggcgatggaggacaaagttcagcaccatcgggtagtcgcgagcttttaccgctttcgccatcgccagcttctgctggaacgcttttttgttgcccgccagcgccgcgttaagcacttcatcgctggcctggaagctaatctggatatgatccagtccggcctcgctgaaggcgtcgagtttgctctcggtgagcccaatgcctgacgtaatcagattggtgtaaaaaccgaggtcgcgcgcggcgcggataagctccggcagatctttgcgcgtcagcggttcgccgccggagaaacccatctgcacgctacccatggcccgcgcctggcgaaagacctcaatccactgttcggtggtgagttctttctcctgctgagcaaagtccagcgggttagagcagtaggggcactgcaacggacagcgataggtcagctccgccagtagccacagcggcggattaacggcgggtttattctggctcacggaagataatccacttctgttggtaagctatctgcaggaattcgatgacgtcgtcatcgacgccgccggcttccgggaaacgggcgttgagttcggcgattatttttgccgcgtcgcgttgaccatcgaccagttcgaggatcgcggcggcggtctcatttagtttcgccattccttccggatagaggatcacgtggctatcctgagcagcttcccactgcaggcggtagccgcgacgaaaggcgatgattgcgcttttttgcatagttataccagtcgggtcgtgtgccaggccgccttgtcggtgaccgtataatagggcgggcgctgcaacgcgtaggccatggtcatggcatccagcatcgaccacagaatgtcgagcttaaactgcaggatctccagcatccggttctgcttttccgcgctatcgcagtagatcttcgccagttccagcccatgttcgacgtcgcgattggcctggcttaagcggctgcggaagtagaaatagccttcttctttgatccatggatagtgctgcggccagctgtcgaggcgcgactgatgaatttgcggggcaaacagttcggtcagcgaactgcacgccgcttcctgccagttggcccggcgggcaaaattgacgtaggcgtcgacggcaaaacgcaccccgggcagcacgtggcgctcgctgagtaactcatcacggcttagccccacggcttcacccaactgcagccaggcttcaataccgccttcctggccgttactgccatcgtggtcgaggatccgcagcacccatttgcgtcgggtgtgtggatcggggcagtttgccataatcgccgcgtcttttagcgggatattggtctggtagtaaaaacggttcgccacccagccctggatttgttcgcggctggcctcgccgttatgcatcgcaatatggtacggatgatggatatggtagtaggcgcctttttcccgtagcgcttgttcaaacgcttgtggcgatagggtttcgcgtatctgcatagttagtcctgaagcgtgataggcatcccgtcccagctcacttcaattccctgttgcgtcagggccttgcgctgcggcgattgctcattaaggataggattcgtgttattgatatgaatcagaattttgcgctttgccgggagtgaggccagcaacgccatcatgccgtgttcatcgccaagcgccaggtggcccatatcacgaccggtattgcgcccgacgccggccgcctgtagttcatcatcctgccagacggtaccgtcaatcagcaggcagtccgcttttttcagccacggcaggagcgcttcatccggttcgccaagccccggcgcatagaacagcgtctggccgttacggcggttttcgataaacagcgccacgttatggcccggcagcgggcgatcgcgaaacggcgagtagggcggcgcattactggcgatggggacggcggtaaactgcagatcgggacaggcgtcaacggtaaaactattcagcggggtgacaggatggtgaatcaggccgccgttccagtgccgtaacatagtaaaaatgggaaaacccgtgctgagatcctcatgtacctccggcgtgcaccagacctgatggggacacccttcgcgtaggctcagcagcccggtagtatggtcaatctggctatcggtaaggataatgccgccaatatgcgtgccgcgcagtacgccttgtttgtttaactctggcgtgtgggcaatttgctggctgatatccggagaggcgttacacagcacccactctttgccgttatcgctaacgataatggaagactgggtgcgggcggtggcctgaattgtgccattgcgcagcccctgacagttggcgcagttacaattccactgcggaaaacctccgccagcggcggaaccgaggacttttataaacatgaagacggaccagataaaaaaacaaaatgcccgcacggacggcgggcggagcgattagcggttggaaatgtacagcgtcacttccagacccagacgtaaatcaataaaagcaggtttcttccacatcgttttttcctctataaaaatgcgacatcaacgtcttcggttgtgtcggttttgtgatggccatcaaatattgcccctcagggagacaaaggtcaaccggcaacatgtaagcatttaaccttatgtttacaatataacctattgttgccaaacattttttaataccttttgccagttgccccaaagcagtttatccagcaccaattgttcataaccgctatggcgcaacgcgttgattagccgtggtaaaccgctaacatcgcccaattcgtccggcagggtgatgccgtcaaaatcggaccccaacgccacgtgatcgtcgccgataatgttaataagatagtcgatatggtgaacgatggtagctaatggggtgtcgctgtcgcgtttgccgtcggcgcgcaggaaagcgttgccgaaattgacgccgaccacgccgccgctgtcgcgaatcgcccgcagttgttcatcggtgagattacgcggctgcgggcatagcgcgtgggcattcgagtgggtggcgaccagcggtgacgtcgagtgttgggcggtatcccagaacgctttttcattcatatgagacacgtcaatctgcatcttcaaggcattggcctgcttaatcagatcgatacctgccgctgtcagtccaggcccagtgtccgggctgccgggaaaggaaccgttaacgccgctgccgaagcggtttgcaatgttccagaacggaccaatgctgcggaccccggcggcatagaaggcctgcaggtcgccgccctcgccatcaaaacctccggcgccctcaatatgcgccaccattgccagtacgttatcctcgcggcatcgttcgatatccgccgcgctcagacataatcgcaagcgtccagcggagtgcgcgacaagttgcttcaggatggccagttgctgccagaggatatcgatcggatcccatcgttggctggcgtattgcggcgccatacgggcaatatattcctgcggtggcacgaatagcgcgaatagcccgccggcaaattcgccttgcagcatgcgcggatagtcgagatgaccgttctcaatcccggcaaagaaagcggttgaaggatcctcgcgatggtgaagccataaattgagcagcaggtcattgtgaccatcaaaaatcgccatagcgcgctccatctggtggttgtactggaaatgcctgacacggtaactgatttgttcgcggcggcaagtggtaactcacaacttagcaacaatcgccaaatctggcgtttgtatcacactgtatcaatcggcaaacctcatacatggcgatgcaaaaacacgataaatcccacacatgctggatacacaggcctgattaactgttcacgtacttgcttaacgcttccagataaaaggtgaaatgaggatgaacagattatccgcaatccgtcatgtcagcgcggcggcgctgtgtctctccacgctgtggtccgccagcgtgtgcgctgctgaagacgcaggcgctttcgacaaggtgcaacaaatcaacgccggcgatttgaatatcggttatgtcgatattgggccacgcgatggccaggcggtaattttgctgcacggctggccgtatgatattcaaagctacgcgcaggtagccccggcgctggcgcagaagggttaccgggtcatcgtgccgtatctgcgcggctacggctccacccgtttcctgtcggctaaaacgccgcgtaacggtcagccatcggcgatggcggcggatatagtgcatctgatggatgcgctaaatattaagcaagcggatttcgccggctttgactggggcgcgcgtacagcggatatcgtcgcggcgctctggccgcagcgggttaagtcgctggtatcggtgagcggatatctgattagcagccagcaaattggcgagaagccgttaccgccgcaggcggaactgtcgtggtggtatcaattctactttgccaccccgcgcggcgaggcgggctaccggcaaaatacccatgactttgccaaatttatctggcatcaggcttcgccgcggtggacattcacggatgccacgttcgccaatagcgcgaaagcgctggataacccggatcacgttgccgtcaccatcagcaactaccgctggcgcctggggttggagcagggcgaagcgaaatatgcggcctacgaacagcgactcgcgaaactgccggcgattagcgtacccacgattaccatcgagggggaaaacaatggcgcgccgcatccggcgccggatagctatcgggcgaaattcaccggtaaatatgagcatcgggattttaaaggcgcagtgggacataacccgccgcaggaggcgccagcggaatttgttcaggcggttattgatgccgatcgcttataagcctcaccacgccgcaagcgcagagttgcgcttgcggaaaagccgcatatgcttttcatgagcttatttttccgcaggagccgcctttggaacgtattgaccacatcctggttgtcgatgacgaccgcgatatccgcgaactgatcgttgggtatctggagaaatcgggctatcgcgccagcggcgcagctaatggcaaagcgatgtggtctgtacttaaaaaccatcaaatcgatttgattgtcctcgatatcatgctgcccggcgatgatggtttaaccctttgtcgtcagttgcgcaatgatggccaacaggatatcccggtgctgatgctgaccgcgcgtagcgaagatagcgaccgtatacttggtctcgaaatgggggccgacgattatctggtgaaaccgttcgtggcccgggagctactggcgcggatcaaagccatcttacgccgcgctcgcgcgcttccccccaatttacaaatcagcgaagccggcaggcttatcgcctttggcgactggctgctcgatacctcggcgcggcatctgatggacgagagtggcacaattgtggcgctaagcggggcggaatatcgcctgctgcgggtgtttcttgatcatcctcaacgtgtgctcaaccgcgatcagttgttgaatcttacccaggggcgtgatgccgaactgtttgaacggtctatcgatctgttggtgagccgcctgcgtcagcgtctgcgggaggacgcgcgtgagcccgcctatatcaaaaccgtgcgcagcgagggttacgtgctgtcagtgccggtgtcgatccgcgaggcgcgataatgaaagtgtggccggcgtcattgcagtcgcgcttaatgataatgatttttctcgctctgctgctcgctaatgccctgacgctatcgcttctgctctacgagcgcatgagcagtgcccgtagcgtcatgctgggcaaccttgaatacgatgtcgccaccagcgtggctatccttgatcgtcttcctgcgcaagaacggccgcattggttggcgcgtctggcgcgcggtaactaccgctatcagctttctgccggacaaactggcgattatcccaccagctggcgtacccgtgatgcggtacgctcgttacaggaagccctgagcggtcgctatcctgtgagtattatcgccgtccctggaccgcgcgaacatattcaggcccacgtgaccctgcgcgacggcgcgccgctaagcattgacctgtggccaaagctgccggccatcgcacgttggctaccgctggtgctggtcgcgcagtttctgttactgctattttgcgcttggtacgccgtccgccaggtggtcgcgccgatgacccgctttacccgcgccattgatacgctgcaaccggctactccggctacagggccgctggccgagaagggaccacaagaggtgcagcgcgcggcgcgcgccttcaacgcgatgcaaaagcgaatacaggaccatttgcaggagcgcgcgcggatcctggcggcgatctcccacgatttgcagacgccgattacccgtatgaagctaagagtcgagatggccgaccaaccggcactccgcgataagctgttacaggatctcgatagcatgacccgactggttcgcgaaggcatcgcgctggcacgatcggccgaaccgctggcagaagcgccgcagcggatgagtctcaatgcgttactggatagcatcgcctgtgattatgccgatatcggtaaagcggtcagttttcgtgccggtaaaggggcggacgtcatgacgcttcagccgcaggcgctgcggcggatcatgagtaacttaatcgataatgggctgaaatacgccgaaaaggtggaaatcagcctgagttacccgccgaatggcgatgttatcattcacgttgttgatgacggccccggcatcccggaaggagagctcaccgccgtactgcagccgttctatcgcctcgagcagtcacgtaatcgcgataccggcggtaccggtttggggctggcaatcgccgcccagctcgccgggcagatgcagggaagtttgaccctgcacaacctgcaacagggcggtcttgaggcgcgggtacgtctcaatgccgccgttttgtatccttctgtatccattccaactgcagataaatccatatactaaaccgccgtttcacggacatatccgccatacagtcgcctgttgtaatgctgacgttgccacttcggcaacgttgcaaaggagaatgatcatggctgttgtgattgcatttttggccggtatgttgacgctgctcagcccctgcaccttaccggtgatcccgctggtgtttgccagcgtaagcgggcgtaaggggcaactgatcctgttgttgttcggtatggggttgatgtttaccgctgtatcgctgctggccacggcggcagggggatggttagtcaatctgactatcgtcgggcgttggctggcgctgggctttttggtcgttgtggctatcagtttgctgtcaacacgcgttgcaggctggctcggatcgccagcggttgcgttgggtaatcaacttaaccaacagagctatcgttatggcagtgggctcgcttcagtattcgccggactggcgattggactactttgggcgccgtgcgcgggaccggtgctgggggcgatatttagcctggcgttgttgcaaggaaattcagtgactaccggcatcttgctgctttcctatgccagcggatgcgcgctgatgttgctgctattggggtggttcggcgcgcggctgatttcccgtttgcgcggtggtcaggcgataagtgggcggttacgccaactggctggcgtggcaatgttggccgcagtggcattaatcgccagcggtagcgatcgttatctgcagggcgccagcggtttaacccatcatctggagcagcggctcagcgcgtttatgccccaggatcaacaacgggttcggctggagccgatcgttgcgccgcggccaaccagcgctatgccggaattgcaaggcggtaccgcatggattaataacccaccccttaccaatgcggcgttaaagggcaaggtggtgctgattgatttttggacccgcgattgcatcaactgtcagcatacgctgccttatgtacgggcgtgggccaataagtatcgcgatgcggggctggtggtgattggcgtacatacgccggaatatccgtgggaacgatcgttgccgcagcttcgtgaagcggtcagccagcggcagctaaactatccggttgtcgcagataacaactacgccatctggaatgcgtttggtaatcagtactggccggcgcattatatcttcgacgcgcggggacaactgcgctataccgcctttggcgaaggtgattatgcccgtcaggagcaggtgatccaacaactgctgcgcgaagcgcggacgtgaggaggaaataaaaaagccgataacagcagttatcggctttgcaggacacgcgctaatcggcagtgtcttatttcgccagcagttcctgggcggtgcgttcaacgaggctcagcaagaccttcacatcgtccagcgtcaccaccgggttgagcagcgtcagcttcaggcaggttacgccgttatgctcggtcacgccgacgttggcgcggccggattccagcagggcgtcgcccacgcgctggttgagcagggcgatcgcggcgctatcactaccggccatttgcgccggacgtgagcggaacagcacgcttgccagctgcggctgcatgaccagctccagcgttggctgagacttcacgaattccgcgacgtttttcgccatcgtcacgccatgatcgatgattgaagcgtattgtttcttgcccagtgcctcaagccccatccacagcttcagcgcgtcgaagcggcgggtggtctgcagcgatttggagaccaggttcggaacgccgtgttcttcatcaaactcggagttcagataggctgcctgatagcgcatcagctcgtagtggcgagcatctttcagcaggaaggcgccgcagctaatggtctggaagaactgcttgtggaagtccagggtaacggaatccactaactccaggccgtcgaggtaatcgcgatactgctcggagagcagcagcgcgccgccccacgcggcatcaacgtgcagccagatctggtgctccgccgcaataccggcgatatcacgcagcgggtcaatcgcgcccgcgtcggtggtaccggcggtggcgacgatggccatgatctgctcaccgttggcctgcgcttgcgcaatcttggccttcaggtcggtgacgtccatacgggcgaattcatcggttttcaccagcgtgaccgagcgatagccaagccccatcagcgccatgttcttctgcaccgagaagtgggcgttttccgagcacagcactttgtactgacgaatatcgcccggaataccatcctgttggatggaatgcccctgacgggcgaagaaggcgtcgcgtgccagcattaggcccatcagattgctctgggtgccgccgctggtgaagacgccggcatcgccagccggataaccgacctgcgcacgcaaccactcgatcagcttcatctcaatgatggtggctgaagggctctgatcccaggagtccatgctctggttggtggcgttgatcagcacttccgccgcctggctgataaccaggcttgggcagtgcaggtgcgccacgcactgcggatggtgcaccgacaggctgtctttcaggaagtactcgatcgcacgttcaatcgccgcctggttgcccagaccctgttcgttaaaatcaagggtgatgcgctcacggagttcatcaacgcttttcccctgatacatttcaggttgttgcagccactgcgcaaccgcctggctggcctgggaaatgacctgctggtaagcgtcaatgcttgccgcggacccagccagaatcggattcaatttggacattgcggtcacttactccactcagaccggtttaacgccggcggccagcaaggcctgttcaaacttatcgaggaacacttccagctccgcgtcgctaatcagcagggacggcagcagacgcagtacgcaaccatgacggccgccgcgttccaggatcaggcccgcttcgaagcattttttctgcagcagcgcggagagttcgccgtcagccgggtagcagcccatatgatcctgcgcctcgttcggcttcacgatttcgataccgatcatcagaccgagaccgcgtacgtgaccgataaccggatagcgtttctgcatttccgccagtttgcctttcagccactcgccctgggcggcgactttgtcggcaatcttgttatcacgcaggtggcgcagggtggtcagaccggtggccatcgccagctggttgccgcggaaggtgccggtatggtggccaggttcccaggcatcgaactctttcttaatgcccagaaccgccattggcaaaccgccgccgacggctttcgacatcacgatgatgtccggctcgatgccggcgtgttcgaaggcgaagaatttaccggtgcgggcaaagcctgcctgaacttcatcgatgatcagcagaatgccgtgctctttggtgactttgcggatgcgctgcagccactcaaccggcgccgggttcacgccgccttcgccctgtacggcttcaaggataaccgctgcaggtttgcgaacgccgctttccacgtcgttgatcaggttttcgaagtagtaggtcaacgccttgacgcccgcttcgccgccgatgcccagcgggcaacggtacaggtgcggataaggcataaactggacttccggcatcatgccgttgaccgccgcttttggcgacagattgccggtcacggacagcgcgccgtgggtcatcccgtgataaccgccggagaagctgatcaccgccgtacggccggtgtattttttcgccagtttcagcgcggcttcaacggcgtcagcgccggaaggaccggtgaattgcaggcaatactctttcccttcgcccggcaggcaagagagcaggtattcagagaagcgatcttttaacggtgttgtcagatcgagggtatgtaacggcaagccgctggtaatgacactttggatgctctgcagtacttcaggatggttatggcccagagcgagggtcccggcgccggcgaggcagtccaggtactgtttgttatccgcatcggtcagccaaacgccttcggctttggtgatggcgagcggcaacttgcgagggtaactcctgacattcgattcgaattcagcctgacgagccaaaaaggtttcgttgttcgcgtccaataaatctgcacttaaagtatcaatacggactttatccgtcatcatatcactcccacaaccagcgttacgtttgaactctggttgaataaaaaggtttagaaaattgaatcggcattcataaagcgcgcacaatatatggctttttaaatccgcattcaatctttaatttatgtcgctattttgacgtcattattacatacagggatgtcaatataattggctgattttaaagctaaatttcgattgtttttaaaaccatgaaaagtgtaattattagtgaggaagtctatatatttttattaccgcttcgctgaatgactgacggaaatacttccgtcagttttatggttacttaacgcagttcgatcgcataatttgctaaaggtgttacttttttcaccaacttattgttatataaaaattgttcatacgcgtcgtagcgcggcttatctaacgctgccggatcggtggcgaacagcggcacgctctgcaaccacgcctgctggttcagttcggtattgagttccggatgcgctttggcaaaccgctgccaggtttgctgcgaatgcgcgcgcaaatagctcactccctgctgtaatgcgtcgaggaattttttgattttaggggcgttgacctcggctttgtttgccacgatcaccagttcgtcgtaagcgggcacaccatagtcttccacattcatgaccaccggtcttttgccctgcagtttgagttccagcgcttcgatattgcgataaccgccgataacagcatcgacctggccggccagcagagcgctggtgagctggaaattaacgttgatcagtttaatgctgttagggtcgatgttggcgtgctgcgccatggtggccagcgtcgcttgttcaataccgctcaccgagtatcccacttttttcccttgtagatcggccggagatttgatgcgcggatccagcgcaatcacggtattcagcggcgagtggatcagcgtcccgacgcgaaccagcggcagtccttcatcggcgaagaagtgaacctgcggttgataggttatcgctaaatccgcctggcgagcggcaaccaggcgcggagggagcgccgggtcggaaggggggatgatgttgacatccagcccggcatcccgaaaggcgccaatctgttccgccaccataatgggcgcatgatccgggttgatgtaccagtccagcaccagggtcaacttttcatttgccgatgcctggccgcagaccagcagagtgaggccggccaacagaggtttacgcatatctcttccttattatctgttgataagtcattccggcgaccagttgatcagccggtgcaaaaaggcatcgaccgccaaccacagcgcgatggtcagcagcactaaaatgaacaaggcggcgaagcagatatcggtttgaaggcgagcattggcattcagcattacgtagccaagcccctcggcggagccgacccattcgccaataatcgcgccaatgggggcgacggcggcggccatccgcaggccagaaccgagcgcgggtagcgccgccatcagtcgaacatggcgcaactgagcgccaaaggaggcgcccatggtgcgggccagatcgagatagtcgcgattgacccgttgcagaccgtcaaagaaagccgaggtgacgggaaagaagataaccagcaccgccatcataaccttggcgctcataccaaaaccaaaccacagtaccagcagcggggcgagggcgaataccggaatggcctggctggtcagtaccagcggcattacccaccgttgtaatcgcggagacatggtcatacagagcgccagcaccataccgagcgcgacgccgagcgccattccgctgagaatttcgctcagggtgacaagggtatggctggccagatagctacggttattccacagcgcttcagcgaccgccgccggagaaggcaacaaaaaagtgggaatgccgctgtagctcgccagctgccagagcaacagtaggccacaaaatacgctgcacccgcgcagtaacttgcccctcatccgttcgccctcatcaattgctgcagcagctgcgcctggcttgccagcagcgcgggatcatccggggcgcgaggcgggattccgcttaaatgatgactatcatcaatcctgcccgtcggcgaaagcaccagcagccgatggctgaggcggcaggcttccatcgggtcgtgggtaatgagcactacggtacgcccggtgagcaagcgcgcggcaagggtctgtatccgcgttcgggtaagcgtatcgagggcggaaaacggttcatccatcagcacaatggggcgatcctcatagagggtgcgtgccaacgccgcgcgctggcgcatcccaccggacagcgtggccgggcgttcatcagcgcaggaggcgagcccgaccagctcaagaagctcgtttacccgcgtgttatcggccttctcaccgcgcagcctggcgccgagggcgacattttcccgcacgttaagccacggatagagcagatctttttgccccatccacgccaatcgcgtggtaacaggtaggccatcgctggcgacgacggttccgcgggttggcgccgccagcccggcgataatacgcaacaggctggttttgcccgcgccgctcgcccccagcagcgacacccattgcccggcggcaatatcgaaagagagatcgtgaaagatctcccgcgagccaaaacgcagacataaatcgcgaacgtgaatacctggcgccatcacgccttgtcctgcccggcggcattcagtcccatttgccagaaattgccttccagctgggtagcggtagtaaatatgtcgctcagcccggcgaaccgtgattccgcgccgcgctgttgccagagcgtttccagcaggtcgatcgccgcgttgacgccctgaagatagctctcgtcgccgtaattgcggatccacggcgcgtaggggttatcgtgcaagttggtttgtggattgtgcagcagaccaagcccgatctccgcatagcccgcgacgcagggcagcagcgccgccagtagatccaacgcgtcgccggagtggccgatatccagtacgtagcgggtgtagttgatggtttccatcgcttcgctttgcagggccatagcgtcttcgctcaacccccattgctcgcaatagcctacatgtagcggtagctcagcaaggatggcattcatcgaggcggcggcggcgcgcatctccggcaacgtgcgaagtttgctgaccagcagggcatagctgcgggcgaaatggattaagaaaagataatcctgagtcagatagcgccgaaaggctgcctgcggcagcgtacccgcggctaattgctggaggaaagggtgcgatacgtaccgttgccattcgccaccggcctgctcgcgcagtcgaccgtaaagaccttgggtaaaagcgggaatcatcatgggacctcctgaaaatagggggagatccgggcgtgcagaagtgtgaacaggcaaaactgaaaactggcgaacatgccgacccgtcccttcgctggcatgacccagatcaggttcaaagggttcggcttttacgccatctcagccctcacgggacacccctcggttgcgacatgttatacgtcattcactttttgattacaacggcggcgaactaaaaaccatcgcacatggtgacactgtcacttattaatagtcatgaaccagaacgataaataacatttatcaatttgtgtgattaaccacgcttttttatccaaaaataagcaaagtaaggagagggtaagttggcgaagaacaagggcttacgatatatttttagctcattcccttaatattcccttatgaatgcgtcagtgctggagaccgcatgaagctggcaggccttactcttttactgatgcttgctctcgcgcctggcgcgtctcgtgccgcccaattgttcgaccctgaagatggcatgctcgatatgagccagtatctgcaggataacccgtacggttttttgccggtgccggtgatgattaccgaaccggctatcggctacggcggcggtctgtttggtttatttctgcatggtaaaggctcccgcgagggcgatcgttttattccaccggcgctgaccggattcggcggtggtgggacgcaaaatggtacctggttcatcggcgccgcgcatcgtcatacctggaatcatgacagtattcgttatctggttggcgcgggctacgccaatgtcaatctcgatatctattcgggtgacattgccgggtttaacaaaaatgtggcggtgcaaacccataccaaaggctttggcggtttacaaaagctgttattccgcgtggggaattcaccggtttttcttggcgcctcgcaattctatgcgcacaccgatgtgaccgcggacaatcagctgatcaacaaggtgtggcagcgggtgctgggggaaaacagcacctcttcggccttgggcgtggtggcggaatatgacaccactgataattttttctaccctaagaaagggttatcactgcagggcgagtaccgtttttaccgcgctcttctcggcggcgactatcattacaatcagttgtcgctggatggtaaatactttctaccgctggcgccgaccttaaccctggcgctggcggcaaattatcagtcgctgactcatcatgacaagcatctaacgccaatggcccggccttacatcgaactgcgcggcatctcgcgttttcgctatcagggcgattatgtcgctgtcgcccagacgcaactggcctggcaatttgcgccgcgctggatcctgcaaggttttgtcggtatcggcagtgcgagcgatgaggcggggtcgctgtggcagcaaaccgaagtggcgtggggcaccggttttcgttatctggtcgcccgtcagtatggtttatttaccggcgtcgatgtcgcatttagcgaacacgaacaggcggtctattttaacgtgggttccggactgtaaaggtacgaataaaaatgagatggaaaataaccgtcatgacgctgctgttgacctctggcgccgtgtggaatgcctgtgcggcggaaagtgacgacagtgatagctactttcccatctggggagacgaagcccgcgcccgcggttattccatcccgctgccgtttggcgtcaatctcagctatatgaatatgcgccaggatattatggtcgacagcatcaccttttccggactgaagctgggtaaccatccgatccccagcgacatgttcgccatcgatgccgggcacacgcgggagaagagcaaaaccgagaatcttcgtctcgatatgtgggtgtttcccttccttaatgtctacgggattttaggccacacccgcggttcgtcggtgtcgaatgtgtcggtcgatgccgacccaacgcaataccgcggcctggatcgcatcatcgccggcgcagtgcataaccttaatcaaagtggcgagttgcaaaatatcgattttgttctcgattttaaaggtaccacctggggaggcgggttcacgctggctggcggctatgagaactggtttgccctcgtcgatacaaactacacccgcaccgatttcgatattctcgacggcagtatttctgccgtgacagtgtcacctcgcgttggctatcgcttcaaccttcaggggatttccggcccttcgcatctcagcgtgtgggtcggcagtatgtatcaggatgtgcagcaggaatttaaaggcaacctggccgatttgcatatgccgccacagctgcagccattgattgccgcggtcaataaagacggcgacggcaagtttgatgtcaaacagaaactcacttcaccatggaatatgctgatcggcgcccagtacgaaatcacgcgtaacttcaacgttctgaccgaatttggctttaacgatcgcaatagtttctttgtcgccggtgaataccgtttttgacttaacggcgtgtagccatcggcgagtatgatgcgcgctgtttttgtgtcatggagaacgctttgatgcgtaagagtttgtggtggttattggcggctgctttttcggtatttgcccaggacccggtattaccgacgattcccgttaaccatgtcagcccggtagtgggtgaattatcgccgccggaatcgctgcgcccatgctgcgccttcggtttcgatctgcgggtgcgcgccattggcgtgccaatcccggtttatcagattggtaatatgctgacgctcgataccttaggtgagcatcattacaacgatagcgcgctcggcgcggtcaaaaatctggttggcttaagcgatgagcacaatggccttatttatacccgccgcggcggttttattgatattgcccatgtgcgtgataccgctgattacaccttttatttattcagccgaatttacccgacgctggggcagtcaggacgcatcttttatagcgaggaactgggcgtacgccgcgtccagttaaatgcctttacgccgccggcttcaatgccgaagcgatatacgattgccgcctggcttgcaggccatctggccttcgaaattgcgcaatggcatgagatcgcccaatggtatggtttccagtcggttccgggtttttcagaagaaatttccgctttttcaccggaagatctctattccaatcttcttggcgcgcgtctggcgattaacgtcattttgcaagggcaagccggttcagtcgatgcttataaccgggcgatggaagcggcgttaaaacaggcgctggtcaaactgttggtcgcgccgcaaagtgagaccgagaggatgttccgtgaagtcgacggcgactggtggaacagtaaacggcgagtgccggataaatttctggtgctgaagcggaattacgatctcagcgaaaatcgcctgccaacgccggttccttttgaacgcacgccgccgtatcgcctgacgatgccaaaggaagttgccgggtttacgctcgcggaactgggtcaactgcaaatccatccggggcaggatatgcagtcgctgccagcgccgcataatttttattctccgcagcagttccaggagctcgctgataaagcgcagcaggcggatgccattcagctgcagcgtattgaaaaataactaacgtttggaagctgctggctatactcaatcaaacgaattcccccgttattgatgaggtagcatcaggctatggtatttggtgttccgcgtgcgtgctggctgctactgacggtgcttttagttagtcaggaaagctatgccctggacggcagtcggctaaagcagcgcgcggacgcggtgctcaccttaatgagttacaccgtggtacctgacgttaccgccagcgatctgaatattggctccggcgcgaatgagaaaaacgaactaaccctcacgcaatttggcggcggcgccaccttgagtgaggattttccgctctatctggaaggcaccctcggttacagtcgctacgatccgcaatttgtggtcagcgatggtgcccagagccgtaccattcccaccaaatggaacagtctgaccgctaccggcggcgtcggctgggactttccattgtatcaggaccgatggggcggaaaactggtgctacggcctatcttcaatatgatgctgggcaccatggccagcgatgcgcgtcttggtcgctgggcgctcgaacgtaaaacggatgccgatattcgcttcctcgatggtgggcgactgaacgcttacgggttgggcgggtcgttaatgcttgattatgaaatgttttccaaaacgcaggatattgacatagaagcgcgctattccgcgatgaatttgcaaactttcggtagcacatcagaagcggtccaggggcaggccagcgccgaaaatctgggtatctaccttcgtcgacgcgcgccgatagccgactggacgctgctgaaaagcccggtgcgctacgtgctggaaggcgctcatactatctatcttggcgaccagcgcggtgaactcggctttgatagcctgagttcgctcggcattggtctggaactcgacagcagccagtatccggtatttatcacccgtacccgactggtggcccgctatatgttcggtaataacaccgaagggtatggcctcggtttagcgatgagtttctgagtcatttacccgttttcatgattgcgctatttttttcatttttattggcaatattttcttcgctgattcgtctacctcgatacatacatttttatgaggtaattgacgatgagagattttgaacgacacgggcatcatcaccagggttttggacgtcacagaatggcgcggccgctgattatcggcgcggtgattgttgtggtgctgagtctggtcgtgatgtcgctatggaacgcattgctgccagctatcttcggggtgaaaagcatcggtttctggcaggctttgggattactggcgctgtgccgtatcttgtttggcggtttaggttttcatcgcggtatgtttggtatggcgcaggcgcgtcgacgcatgcatgaacgctggatgaccatgaccccggagcagcgagaggagtttgcccaacgtttcggccgccacggacatcgcggccgttgcggctggcatgaacgtcgcggtgggcaaccgactgacgataacccatcggcgaaagcgccggatgccgagtgaacgaggtaaacaatgcgatggcgggggaatcacggctgctgtctgcgcttgccgcctgtcgtgcgcgtttaagcgcgtttattcgcggtagaaccgccgtacgtgacgatgccgatgacatcctgcaggaagtcaccctgcaactgatgaaggtcgagcaaccggtggagaacgtggcggcatggttattccgggcggcgcgtaatgaaatgaccgaccggtcgcgtaagaagcgcgagttgccattaacattcgatactgatgaagatggcgatggcggctttgccgaggatgagctggcggaaacgctgtttggcgtcgcgcagacgccggaggaagcctatcttaaagaactgctgtgggaggctttaaccgaggcgctggcggagctgccgccgctgcagcgtgaagccttcgagaaaaccgagctgcagggctatagctacagggagctggcggcagagagcggcgctagcgagcaggcgtggctgtcgcgtaaacacaaagcggtgctgtttcttcgcagccgtttgcgaacgctctacgatgaacttaccgcaccttaattcatgcccggcggcagatagcgccgggctttattttatctgtatttctataacattgtcgccagccactcggcgaagacgcgcaccttgcgcgaaacatgacgatggggataaataagcgataacttcctggagggaaccggattattcggcaggacttcaaccagctcgccgcttttcaaccaggggtgaaggaaaagatccagaccctgcataatgccgagtccagcaaggccagcggcgatgtaagtctctgaattatccaccaccagtttacccgctagcgaaatgttctgctgcccggcgtcagtttgaaacacccagcgcatggtctgatgattactgttattcagccagttgatcgcctgatgatgccgcaggtcgtcaagggttgcgggaacgccgtatttcgccagataggccgggctggcgcaggttttcataccgacggtaccgagatgacgtgcgatatagtcaccgtcttcaagttcgccaatgcgcaggacgcaatcgaggccctcgcgaagcatatcccgccgccggtcggagctgctcagcacaatttcaatctccggatgttgctgataaaaggcggggagattcggcacgaccactaacttcgccagggagataggcatatctatgcgcagttgaccacgtagcggacgctgcggggcgaaagattccataagatcatcggcctgcgccagcaggggtttactacgacgataaaacgcctcgccatcaggggtgaggtggatctgtcgggtggttcgctgcagaagccgaacgccgcagtgctgctcaagctgctgtagcgctttcgtgaccgccgggcgatggatctgtagattctcggcggcgcgcgtaaagctgccagactcgataatctcgataaaaatcttaatagattcaaacaaatttaagttcatttgtaccaatgtgctccgatgacaacatcgtatttcactttgattattacttgtttaataacagtgaaggataacttttactatttttcccaacaataaagcggcctacagtggcgtcatcccagcgctaagcgccagaaaacacactaaggaagccgcatcatgcaaaaccattctgttagccatattctcggtattgaaaaacctgtcattcaggggccgctatcctggctaaccgacgcccggttagtcgccgcagtcagtaatgccggcgggctgggcgtattagggccgaacgcaggtttaaccgcacaaaccgctgtctcgacgccgcaggaaacggcagaaaagatgcgtgaagagatccgtaaaacgaaacgactcaccgagaaacctttcgctgtaaatctcattccgacggttgaaaacgatatctggacgccgccgattgtagaggcagtcaaggaagagggggttaaagcggtggtttataccggctatggtcaaggagctatcattccctcgctgtttgccacgcttaagcaggccgggatcagcattatttatcgtgatattaacccgacgccggaaaacagccgcgaggccgaggagatgggcgctgatgttattgtcgccaccggcttcgacgaaggcggaacgcttccgggaacggcgctagggacgttttccatcgtgccattgattgttgatgcggtgaagcgtgtgccggtgctggcggctggcgggattaccgaccggcgcaccgccagggccgcccacgcgctgggcgcgcagggggtatttgccggctccgtgtttatcagcaccaccgagagccgcgtgccgccatcggtgaaagagatgatcgtgcaagctaacggtctggatttgcagctatttcgcacattgccagattactatcgttcgctgccgggtaaattagccgccaggctggtggcgttagataaatccggcgccagtaatgaaaccatagccgcggaaatgggcggtttacgcggcctgcgaattggtatgctggagggcaacactgacgaaggctacatttcactgggaaccggcatcggcagtattcagcggatcaagagcgtagcggaagtggtggaggaactgacggtttaatctgccttcccgcgttctcatgcggaaaacagaaactccccgttgcgacaacggggagggtgattagccggaattagctaccccagcgctgctgcagatactgaaccgcctgctgggtttgcggctggttaaggttgttttcacgaaacagaatcgtcccctgaatacccggtgtggtttcattgaggtcgatctgttttttcagctccggcacgccgccgtcgaccatccagtctggttcattttttgacggttcgccgactttatacagcgccacgccgatatagagccgggtgtgagtgggtttcacgacatcggcccaccacttagccagcacatcatagcgcgcggcgtcgcgggcgaacggccagtacaactgcggcgcgatataatccaacagcccttgttgtacccaactgcgggtatcggcataggactcgtcataggccgccgcgccacgggtgtcagaaccggccggatcgtgggagcggttgcgccatacccccgccgggctgacgccaaactcaacctgcggattgagtttcttgatggtctgtgagacctgcgctatcaactgttgggtgttgtgacgccgccagtcggctttcgaggcataaccctggccatatcgctgataggtttgattatcgttcagcgtcgatcccggcgtctcagtatagaaatagtcatcaaactgcacgccgtcgatgggatagttttgcaccacctccgccacgatactggtgatccagtcacggacttccgggatcccagggtcgagcacaaagcgatcgctggcagtgcgtatccagttgcggtggaggacaaatacgctggcggggacctgagtcagggtgtggttaagctcggcgatggtagcgggtttggtattaaccgagacccgatacgggttgaaccacgcgtgaactttcatcccgcgtttatgcgcttcatcgagcataaactgcagcggatcgtagccgggattttcgccaattttgccggtcagcatgtctgaccacggcaagatgtgggaatcccacagcgcggtgccgtccggtttgacctggaagaagacggtattgatgcccaggcgttgcagattgtcgagtttggcgatcagcgccagcttctgctggctgatgcggctttccgggctactggcgataattgaacccaccggcggccagtcgagacgggaaaccgtggtgatccaaacgccgcgtactggctgctgattttttgccgatttttgcgtaacgggcggtttgctggcggtcaccagcgattttggcgctttacttgagcaagtcacgagcagcagtacggcggcggcaaccgcgccgagccgggtcatgctggtgacggagaggaggcgacgagaagcgataatcattactcccgtaggcatgtagacgcttgaaaaatcacattgtcttatgattcgcaggtgagggcaaggtgtgtaattggacggagaaaaattactgccatgttgccaattaggatcgcctctaacatccatacataacagtatcctcccagtgatttcctgacaaaaaagcagaattaacctggataattagctggtcggttgtgttacaacatattactaaacgcacagctaaggagaatccgatgcgaaaaatattattgctggccgccgttttgctggcatcatccgcaccgatcgtcacccaggccgaggagattacgcttttaccggctataaaactgcagattggcgaccgtgattcctacggtcattactgggatggtgggcgctggcgtgacaaagactactggcatcgtcactatgaatatcgtgataagcactggcgaaagctggagaaaaagcagcgaaaagcctatgagaaaggttatcgtgatggtcgcaaggattataagaagcgcgaaaaagagtacaacaagcaccacaaacaccatcatcactaaataagattggagccattatggctccaatctgctattaccttctgccttgtgtctgaaatattgtctgataatgtcttcatcgcagaagcaaattaccccatcaatctcccttttcagaatgaactaataatattgcaaacggcctaccaacattagtgggggtaatatgcgtgtaaaaatttttaggataattccatcttttcagtgaatgaaaaatccgatttataaaactgtatattatattcattaaatcaatcagttaaatttcactttcttttgtatggtttttgcgattacacttttccgccgtcagaaggttttttcagggatttcaccattataagattagtctgaaaaaattaattccgccaactgctcctgataatggggcgaaattgcgtgttgaattgactcgatcgatctgtaaaattgtgtggtgatagttaatgaaatgtaataaagggatccactgcggtgaagattcgtgcggtagctatggccatatcacagctggaacccttttacgcacagtgattaaggatattcagacttgttattcaagcagggataacccttaagaaaataatagcattacaatggaaaagcatatgaaaacgcgagtgtttttagccgctatgattgcggtttcactggcagggtgcgaagcgccgccgaagccgcaaattaccgatgacaccattgaaaccacgcaggttaacggcgtcaatttgacccatcgccatattgttgttcctccaacggaatttaccccgattaacgcagaatatcgcgcgctgtattccgccgcggtaatgagccaggccgggtatggcggcaaagtgattgtgcaattagttccaggtgctaattatattgcattgggacaggcccaggacggctggatagcgttagccaatgaaggtcaggaaaatttaattggctatgctccggccaatgccgttgtcaaaagtgagctgtatgataaaacggttcgcgaacagtcgaagcgcccgaaggcgcgtaagaaagcgacctgcgtgagcgtcgacggaaataccaaagcctgcaaaaacggcaataacggtacctggattctggattaatcccgcctttacgagcgacaccgtatgaataataactctcttttacgccaggtcatgctggcgttttatttgtttctttttacgttggttagtggatgtggttcgtcttcacacagcgaccctgcccgatacaatcttcagttccaggcccacccgcaaattaaccgttctgcgccattaaaggtcagagtgttagtgctgaaatccgatgcggaattcatgtccgccgatttctactccttacaaaataacgcgcaaaaagttctcgccggcaacttgctgaacagcgatgaatttttcctgatgccggggcaactggcaaaaaaactcagcgggcaaagctcgccggaggcgcgttatatcggagtgatggcggaataccaatctctggatggtaaaaagtggcgcatttctcttcctctgccaacgcctggcgaaacccctttctggcagttctggaaactgtcggcagatcaactgcaagccaatttatatcttgacgttaacgggatccgcgtcgtgcagcaatagcgcgagccctaacaggaaatttgtatgaataaagcagaaaaggtggtctggaccgagggtatgtttttgcgtccgcatcactttcagcgggcagaaagctacctgcaaacgcaaattcgcgaatggggcggattacagcgctcctggctgtggggttttcttgagattgaacttgatgatgcgatgctgcgtcaggggtgcattgccctgagctatgccagcggcctgctgccggatgggactttcttccagtttcgcgatgctcgtcagggcccggcgccgttgcaaatcccggataacgtcacgggcgaaaaagtcgtattggccttgccggtacgccgcggcggtcgggaagaggttatcttcagcgaggaaaaagactcgctggcgcgatttaccgcgtttgaacaggatgtggaagatgacaatgcgctgtcggttggcgatgccaccgtgcagtttgcccgcccgcggctcaccctgatgctggaaaaggatttaaccgccgagtggacggccatcggcgtggcgttcatcgccgaaaagcgcaacgataacgccgtaaaactcgataatggctatatcccgccgatgcttaacggcatcaatcatcctttgatttacgcgatgatcaacgacttgcatggtctgctggcgcagcgtagccagcaaatcggcagccggctccgacagccggggcgttttaatacttccgaattaattgagttcactctacttgcgttggtcaatcgccatctcggccatctctcacatctcaaaacgctgccgttagttcatcccgagtcattgtggaatagctggctgccgttcgccgccgagctgacgacctggatggcgcagcgcggtccggatgctgcgctgccgatttacgaccatgacgatctcgcgagctgcttcggcaaactgatgctgttgctgcgccaggggttatcacaggtaatggaagacaatgccatccaactgccgctgatagaacgatcgcatgggttgaacatcgcaacggtacccgagagcagcatggtgcgtgatttcggattcgtattggcagttaaagccagcgtaccaggtgatgttctgcaaacgcacttcccggcgcagatgaaagtcgcgccggtgagcaaaattcgcgatctggtgcaactacagcttccgggtttaattctgcgcgctatgcccgccgcgccgccgcaaattccgtggcatgccggttacaactactttgcagtcgagaagggcggcgagctgtggaacgacatggagaaatctggcgccttcgccctgcatctggcaggcgagttccccggcctggatatggaattttgggctatccgtagcccgtcggaataagaaagcgagcgttgatgatgcaggaacaacaggccgatgccaaccatggcgtgagcggcaataatcccctggtgacggccgccaacccattacttaatgcgattccccagatccgtcattcggtatcgcacgatgaccaggccggtttgcgccagcgtttgattgatgaaatccgccgttttgaagtgcgcggtcagcaggcggggttaccctacgaagtgatagtcggcgcccgttactgcctgtgtaccgcactggacgaggctgcggccttgacgccatgggggagtagcggcgtctggtcgggcagcggtcttttagtgacctttcataacgaaacctggggcggggagaagtttttccagctgcttgcacgcctgtcgcagaatccgcgcgaacatatcaatctgttggaactgatcaactactgcttattgctcggctttgaagggcgttaccgggtaatggataacggccgcacgcagttggaaaccatcaaacagcgcctgtggcagatgatttgcggcgtacgcggcggctacgcgccgccgttatcggttcacggcgaggatcgcccggtgctgcgtaaactgtggcgtccggtggtgccgctgtgggcctgcgtcgcgctggcggggttcgccgcctctctgttctatatcattcttaactggcggcttggcgatgctaccaacccggtgttggcgaaaatttaccagacgccgttgccggaagcgtcgattgctcagccggcggaaaaattgccggcggtacttaacctgcgaggttttctgcgcccggaaattgccgaagggctggttgcggtccgtgacgaagcggaccgcagcgtggtgatcctcaaaggcgacgggctctttgcttcggcctcaacggtggtgcgcgatcgctacgacccggtcattgaccgtattgcgcaagcgatgaacaacgtcagcggccgcattctggtggtcggctatagcgataacgtgcctatccgcagcgcgcgctttgcctcgaactacgagctgtcgctggaacgcgcgcgttcggtacaaaaacaactgcaaaatcatctgacgcagcccgaacgcgtaaaagccgaagggcgaggggaaatgaaccccatcgcgccgaataccactcctgagaaccgtgcccgtaaccgccgtgtggaaattactctgctggtgtcgcccgataatacccgggctgagctgaacggattgccccaaggaaattaaggatgctgacacttctgctttccatactgaccaaccggctgctgtggggttttctcggcgccacggcggtggcggccgtcatctggatgattggcccgctattgtcgattgtcgatacccggccgctggaatcggaacaaaaccgcgttatatctattgcgctggtctacctcatctgggcgcaaagccacattctgccgcgcctgtacaacgcctggctcaaccgcaagctgatggataacctgaaggaagaaacaccgaagggcaacgatccgcagcagcgcctcaatagcgaagaccagatcctcgccgatcgctttgatgaagccgcgcaaatgttgaaaaaagcgcacttcagtaaaaccggtaatggtcagtggacccagcgctttagcacccactatctgtatcagctgccgtggtatgtgattattggcgcatctggctccggtaaaaccacagccttagccaactccgggctgcagtttccgctagccgaccgcttcggtaaaacggcgttacgcggtatcggcggcacgcgcaactgtgactggtggtttaccaacgaagccgtgctgctggacaccgccgggcgctataccacccaggagagcgagcaggcgcaggacgccagcgagtggctgaagtttatggggttattgcggaaataccgccgccgccagccgattaacggcgttatcgtcacggtaagtatctccgatctgttaacgcaatcgacggaggcctcgcggcagcaggcggttaatctgcgccagcgtctctctgaactacatgaacaattgggtattcgtttcccggtatacgtactggtgacgaaggccgatctgcttaaaggcttccgcgcctggtttgccggttacgacaaggcgcagcgcgatcaaatctggggcttcactttcccgtgggagcaggcaagccttgccgacttcgatctgatgggccgctttacccaggagtttgcgttactgcaacaacggcttgaagccgggctgccggatacgatgctgcaagagcatgatgccaaaacccgcgccgaagcctggctgttcccgcaagagtttgcggcgttgcgaccgctgttagcggactatcttagtaccgtttttgcccgctctaactttgaaaccgagttttcaccgcgcggcatttatttcgccagcggcacccaggaagggttaccgttcgaccgcgtgatgggcgaactcaatcgcgcgctgtctttgccgcagggaaatgaaaacgacaactgggactcggtcagtaaagaagcgccgatccccggcgccaagggccagagttatttcattaaaaacctgctgcaaaacgtgattttccaggaagccggcatcgccgggcagaaccgctggtgggaactgcgtaaccgcgcggcgatctggtcaggctatgcggcgctcgcggcgctgttaatcatttcatgcgtactgtggctgaccagctacggcaaaaacaaggcctacctgcaagaagtctcggcgaaggtgccgcaggttgagcagcagagcaaagcgctgcaaaaccccgagcagcgcgatctgttcgccatgctgccgctactcaacggcctgctggaattgccgaagagcgccgattttgacgtcaacgacccgccggttagccgccggatggggctctaccgcgggaatgatgtcagcgacgcctcgcagacgctgtatcaaaaagcgctgcagcaaatgctgctaccggatgtcgccatgcgtatcactacctggttgcgcaacgacaacggcagtgacgccgaatatagctacgaggcgttgaaagcctatcaaatgctctatcagcccaagcagtatgacggcaagtttttactctcctgggtgatgcttaacctgcagcgtaacctgccgcaaaacgtgacgcaggcgcagctacgacagctggaagggcatctggtccagctactggaaccgcaaatccagtcctcgccgtatgccaaagacgatgcgctgatcgcccgcgaacgggcgttgattaaccagcaaccgctctcctcaagagtgtatggtcggctgaaacgtctgcttgagcatgacgacaatctgaaagcggtctcgctggcgacgctcggcgggccgcagagcgaactggtgttctcgcgtaaaagcggtacaccgatcgcagaaggcgtgccagggctgtacacgccagatggctactggcaggtgttcaataaacagatcgataacgtgaccagcgcgctgcatgaagatgatatttgggtgctgggcgccgccagcgcgtcggaagataagcagcaaaccgataacgccgtccgccagctctatatgcgtgattttatcgccaactgggatcgcttcctcgccgatattcagctcaacaatagcgccgatctgtcatcgcggatcaacaccgcgcgcctgctttccgccagtaactcgccgctgcgccggctggttatcagcctgagccaggtgctgaacctggcgcgcgctgagccggatacggttaaaagcgaaagttcagccgagcagggcaaccgtgcgacccgaacgctggaagcgctttttcgccatgatgagggcggcgcaacccagggcgcggcgcttagccagacgccggaacagctggtaaccgaacactacgcgccgctgatcgagctggcgcagccgttggaaaagggcggcaaaacgattgtgtttgacgacttcctcaaacagatcgacgaactttatcgctacttgaccgcggtacaggatgccgccaacagcggtatgcaaccgccgggcggcgatgcgattagccgtctgcaggccagcgccgggcgcttaccgggcggcctgcaaaccatgttcagcaaaatggcggtcggcgccagcagtgatacccagcgccgcgatctcgataacgtacgtaaacggattaacgtggaagtcggcggattctgccgccaggctatcgccgggcgctatccgctggttcgcagcgccagaagcgaagtcacgccggacgatctggcgcgtatgttcgcgccgggtaccggcatgatggataccttcttccgtgacaacctgaccaataaagtcgataccacgcaatcaagctggcgttttatgcccggcatcgatggcaaaacgttgccgggtagtgaagggttattaaggcctttccagcaggcgcaatcgatccgcgacgcgttctttgccaatggcgcgaccacgccgtcatttaaagtgacggtgcgcaccatcagcatggacaaccggatcctcaacctgacgctggatgttgatggccagcagttgcgctacagccacggtccgcaggcggtgcaaatgatgagctggccagggccgggcggcaccaatcaggtgcgtatgcaactcggtctggccgatggtaccacctcgacgctggtgaccagcggctcatgggcgctgaaccgcttttttgataaagcgcgcaccgcgcccggcagcagcagtttgagccgtcaggcaacgtttaacgtcgatggttatcaggtcacgctggagtttgcgccgaacagtattcgcaatccgttccagcttccccgtttctcatgtccataaccgcaaggaaagccgaatgactcacgcccctgcgatgagctggtacgggaaactccccagtaccggcgattttttacaacgtcgatttccggacatgctggttcgccagtggtcgcaatggtttcaggtggggctgttggcctggcaacaggagcaacagcgtagcggcgaacgccagttcagcaacgcgccggtgtggaattttatcgtcccgccgatgttgagcggccagatggtacagatggggtgtctgatccccggacgcgatcgggtaggccgccagtatcccatctgcgcgcaaatggccttcaacccgctggagtggtcgccttcaatcctcactcaggccggagagtggtatcagcaggtgggcagaacgctgctgcatgcggtacgtaatggcttttccgctgaacaacttgaccaggcgctactcgccattccggcgccaaagctggtagaggcggaaaagcgttcggaaatactcgacgtgattggctatcagcaagatgggcaaagctcccttggctggcagcaggcggcggactgttttgatccgcagcgtcagaccagtttttggtggaccaaccgcgccgatggttatccgctctatacccacgtccatagcggtaatttgaccggccagctgttcacgctgctgtttgatcccgccgggggcgcgagaccgggccgtcacggtctgtatccgccgatgtttgaataagcaggtaggccatgaatattgatgaattccttgctccggttagcgcggagcagccctgcggtgaaaacctcgaatatgacgccgatttccaggcaatggaacaagcgatgcagggtaaagccgagcagcagttcggcgacaccattatcccggcggaacccgctgactggacgacggtagaaaagctggcggctgggctacttagccgcaccaaagatttacgcgtcatgctggcgctgactcaggcgtggacaaaacgccgcggcctgagtggttacgcggatggcctgctgctggtgcaacaggcgctgtcgctttactggcagcctatctatccgctgctggaagagtatggcgaaactgatccgttttaccgcatcaatgcgctcgcggggctaagcgataaatcagcgctgaccagcgcgttacgcaatgccgtgctgttacgcagtaatggcgatgaactgctgctgcgcgatgcgcaggcgctgctcgatggcagtaaaaccgaatgcgcggattatcccggcggccgttcgcgattgattgatgaactggcccgcggcggacagccggggatagacgccatcctcgccattcaccagcgcttgcagaccatccgcgaaatattatgcgattgtctgggtgaaagcggcgtgccggaaatggaacaactgcagaagaccgtcggtatcgtcgccggcgcctgccagataaccgatatttcgtcctttcacgcgtcccgcgaggagagtgccgtgagtgaacatcaagcgattcccgacgcgcatgcgccgtcagccgttgactggcgcagcgcgcaaatcagcagccgcgccgaggcgcagcaaatgctggaaaaagtaaaacagtacttcgcccagcacgaaccgagtcaccctgcgccgctgatgattgaacgggtacagcggctgattgagctggattttatggacatcatccgcgatttagcgccggacggcgttcatcaactggaaaacatttttggacgtcgcgactgacgcgtccggacattatggcgacaggcataaggtctggcgctcaacctttaccgcgcatcttcgatggagaacatcatggcaataagtaaaagtgggcagaaatttatcgcacgcaaccgtgcgccccgcgtacagatcgagtacgacgtagagatttatggtgcggaacgcaaaatccagcttccgtttgtaatgggggtaatggcggatctggtgggtaaaccggtcgacaaccaacccgcggtcgatgaacgtaagttcctcgatatcgacattgataacttcgacgaacgtatgaaagcgctgaaaccgcgcgtcgctttccaggtcgacaatactctgaccaacgaaggcaaactgaacgtcgacttaaccttcgacagcatggacgacttcctgccggatgccgtggcccgcaaagtggagccgctgaacaaactgctggaagcccgtacccagctttcgaatctgctcacctatatggacggcaaaaacggcgcggaagagctgattgccaaaattttgcaggatccgacgctgctcaaatcgttgagccagatgccgaaacaagatgacagtgcgaaaggtagcgaggagtaatcgatgagcaacccgactcaacaacatgagcagcagtccagccaggcctttagccaggatgaattcagcgtgctgctgaacaaagagtttcgcccgaaaaccgaccaggcgcgttccgccgttgagagcgcggtaaaaaccctcgcgcagcaggcgctggaaaacaccgtcacgttttccaacgacacctatcgcaccatccagaacctgattgccggtatcgacgagcaactgtcgcgtcaggtgaatcagatcctgcatcatgacgagttccagaaactggaaagcgcatggcgcggcctgagctacctggtcaacaacagcgaaaccgacgagatgctgaaaatccgctttatgagcatctccaagcaggagctggggcgcactctgaaacgttacaaaggggtgggctgggaccagagcccgatctttaagaaaatttatgagcaggagtacggccagtttggcggcgagccattcggctgcatcgttggcgattactatttcgaccatagtccgcaggatgtggaattactgggcgaaatggcgcgaatcggatcggctgcgcattgtccgtttattaccggtaccgcaccggaagtgatgcagatggagtcctggcaggagctggcgaatccgcgcgacctcaccaaaatcttccagaataccgaatacgccgcctggcgttcgctgcgcgagtcggaagacgcgcgttatctggggctggtgatgccgcgcttcctgtcgcgcctgccgtacggtattcgaaccaacccggtggacagttttgattttgaagagcagaccgacggcgcggatcacaacaattatgcgtgggccaactcggcgtatgcgatggcggcgaacattaaccgctcgttcaaagagtttggctggtgcacctccattcgcggcgtggaatccggcggcgcggtggaaaatctgccttgccacaccttcccgagcgacgatggcggcgtggacatgaagtgcccgaccgagatcgccatcagcgatcgccgcgaagcggagctggcgaaaaacggctttatgccgctgatccatcgcaaaaactccgactttgccgcctttatcggcgcgcagtcgttgcagaaaccggcggaatatcatgatgccgacgccacggctaacgcccgtctggctgcgcgtctgccgtacttgttcgcctgctgccgttttgctcactacctgaagtgcattgtgcgcgacaaaatcggctccttccgcgagcgcgatgatatggaacgctggctgaacgactgggtgatgaactatgtcgatggcgatccggctaactcgtcgcaggagaccaaagcgcgcaaaccgctggcggccgctgaagtacaggtagcggagatcgaagacaacccgggttactacaccgcgaagttcttcctgcgtccgcactaccagctggaagggcttaccgtgtcgctgcgtctggtttccaagctgccgtcgctgaagaccaaggaagcgtaatatgatgccgccgggaggcgactcccggcaggtacaacgccatggaagaaggtaaagaaatgaaattattaccactctgcacgctgggactgctcacggtgctgacgccatttactgtcgtccaggcggctgatgattccgcaaatttactgcgcgatcccaatcaactatcacgtaatgatgtgcggttgagcggcgaaaagtttctcaaggcctggctggcgcaagacaatacccagcagcagttaaaggccaatatgtatctgcttggcgtgatggatgcaacagaaggtaaagcctggtgcggttatcagcaggcactgccgggatcgcttcgagaaagcgtctacagctatttcaaaaagctgcccgacgagcgtaaaaaacagcctgcggcgatgctgattaccgaagcgttggcgaaggagttgccttgcaaacagggagcgacgtcatgagacctctttatgcacagctcaaaatgcaacattattcggcgaatgaatcacgcccaggctatgtacctcgtgaaacgctatttaatgagattggctatgacgccagtgcgctcattaaatcaaatcctggttatatgaatacctgtgcggtacgtatgagcctcgcactgctgaaatgcaatgtgagctttagcgggcgtttacccataaaagcaggcgcttacaagggtaaaaagattgaaccgggcgccaagctattggccgaccaactgtataaaaataacctgtttgggaaagctgagatttatcaggagatacgtcaggcagcagagagtttgcgtaatcgcaaaggcgttatcttctttaatagaataaccaactataacggtggacatatagatctactggaaccccttggcgacaacatgatgcaatgcaactctgattgctacaccgactgcaaagaaatatggttttgggaattgaggtagcaaccaaagtcaatttttgggagttgctatgaacagaatcattatcagtctgctgcttgctagcagtgcgtcggcttatgccggggacgacccggtattgtttgttaaacagctaccttataagcaggttgttaaagacgtggttttatcccgctgtctggcgcaggtagccgatgataaaagtcagttttctgtagatgctgcgcgcagtagcaatgcgttgctggagtgggtgcctttcgatattgaaaacggtaatgacaaaattaacgccattattgctcaatacaaaagtgccaccaatggctttcattccgaaagacaacccgcaattcagggcgtcactttgaattgtttgcgcctttatcatagtacggagctggataaattaacttcgcagataatcatctgtgatcctaataaaacctggagtcaggataacccgcattaatttcaactttgcattcctgctatttcacagcatgagtgttaagaccagcaatgggcttaagcctgttgctctgaggcagaggtaaaatatggatggttttattcagccccatgctttcctgtttgccatataagtgctttttcgaaagcaataattttcattaacgaagagtagatattatggctattgatatgtttctgaaggtcgagggtgtaaccggtgaatcaaaagattctaatcacaccggttggactgatattacctctttttcctggggcgcatcccagccgggtaatatgagcgtgggcggcggtggcggtgcgggtaaagtgaatttcaacgacctgcacgtaaatgcgctgatcgacaaatccaccaccgcgattctgaagcactgctccagcggcaagcacctgaccaaagttgaactttcggtctgcaaagccggtggtcagcaggttgaatatgcgcgaatcaccctcgaagatgtactggtgacttccgttcagtacaccggcgccgataacggcgacactgttggcgtaacctatgccttccaggcggcgaaagtgaaacagcagtactgggagcagacttccgctggcggtaaaggggcagaaagcagcgccggctggaatatcaaagaaaataaagaagcataattatattgctgtcaccgggttcagggaataattcctgaacccggtttttaccggtgagcattatattcgcatagagatcatcgattatatcaataactcgcccgtaaacgccgccgttcttattccgagagcggcagcgtttgtgcgccaatcatatcagcaggaataggctatgcgattcacgattatttcgaccaaagccggtcatcagcccccgcagggcagctgtgacttttacgcgccgggcggtaccattgggcgcggtacggacaataacctggtgctgccggatgacgaccgcgccatttctcgcctccaggccatcgttcacgtggcggcagacggcgagtgcaaaattaccaatcgcggcaacgtgacgcgggtggtactcaacgagatcccgctggagcgggggcgtcaggttgaactccaggatggcgatatcctcgccattgacgactatcgcatcgaagtcagcgatctgctgcaggatagccaaccgataagccgaatggcggcgagcggtcagccgcctgtcactgcgaaaccgtcgacaccagctccatccgcagcggccaccgtggcggaagccgcgccaaccgcggtaccgtcagaaatctgggatagcctgatgcaggaattctcgattgccgacagcatctccagcagccgggctaagccgcaggccgataatgcgcctaatcccttcgccgagccgaagcctgccgaacgtaatccggaagatccgctggcgatgttcgctgatagtgaacctctgtttgagcgcccgccggtggcgacggacgacctgtttgccgatgacaccccatttgatcgcgacagtatttttgccgacgttacgccaacgacgctggtgccgccagttgaaaaaccggctcagcctgtcgccgatgagccgcaggcagaattggatccgctggcgctctttggcggcgacgccagcgccaaaaccgcgcgtcatgacgatccgctggggctaatgggcggcgcgccgctgacatcggtagatgccttcagcaacgaagagcctgctaaaacggttgccgacgagcctgatgccgcttttgattcgccattattgatggcccagccgccgcaggagccgcccgcggcagcgcgcgaagaagcgccggaaataaccttaccgacgccgcaggccgtggcgcggcaagccgcccaaacgccaaaagggcgcttgcgtatcgatcccgtacgtcatgaacatcaggcgaccagcacgccgcagccgggtaacggcgaagtgctgcagggagagctactggaagccttactggaaggcatggggctcggcgatatgcagccggtcccgcagttcgacaaagagaatatgcgacagcttggccaaatgctgagcatgttctcgcagggaaccgtcgcgctgctctcttcgcgttcgatcctcaaacgcggcgtcaaagccgatatgaccatggtactggacgacgccaataacccgttcaagctgttgccttccgggaaaaccgtgctgatgcagatgttcggcgcgcggatgccgggctttatgccgccgaaaaaatcggtacgcgatgcgttgattgacctgcaggcccatcagttagggatgatctcggggatccgcgccattattgccgcgatgctgcagtcctttaatcccgagcagctggaagaagaggctaagcgcgatggccatacctcgcgcctggcgcttccggccagccgcaaagcggcgttatgggactattttgtccgtacctacggcgaaaccgccgggcaaattgaagacgatttccacaccctgtttggcgaagcgttcctctatgcctatgacatggaagtgaaccagtacaaagactcacagagcggatcggaagaataatggacattaccacggcttctctttcccgccagggaacgcgcgccagcaatcaggatcagaccggcgaatgcgtcggtgagcgctccgcctgctttgtggtctgcgacggtattgccgggttgcccggcggcgaggtggcggcggaactggcgcgcaacgcgattctggatcggtttgacggcgataatcatctgaacgcccagaccattcgccagtatgtacagcaggccaacggcgccattctccagcaacagcaggcgacgccggattatcggcgaatgggcaccacgctggtgagcctgtttatcgatcgcgattataagctggcctactgggcccacgccggcgatagccggttatacctgtttcgccgcggctggctgtaccacgtcaccactgaccacagtctggtccaacagatgaaagatgccggacatcagaccgacgatattaacagcaacctactgtaccgagcgttaggcatggccagcgacggttcggaagccagctatagcgatgtggtgccggtcgaagacggcgatgcctttttgctctgtaccgacggtttctggcacggcgtcggcgaagagcagatgaaatcctccctgcagatggttaataccccgcaggagtggttaaccctgatgaatcagtatcttcagagaaacaatgacggcgaccaggcttcgcaagacaactacagcgccgtcgcggtatggatgggcagtccggaagaggcgacgctgctgcactcgctggccgacgccgcgcaatttttccccctgcgggattgagacaggctaagaaggatttttatgaaacattggatattgggtgcggcactatttgtcgccaccggcgtcgcacaggcggaaaactaccgtatcgtgcaatcgccttcgcaaaaactggatgtctggatcgataacatcaagggtaataccgcgcagagctggtgcgctaatgaagtggcgctacgcatcgtcgccaacggtaacaagaacgttaagatactggataacttcctgccacgcgtcggcgcgttaatggagcatcagtgttcgcgtttacagcagctgaactggacgctggttgatgctaacaatgggcatattgcccagggaagcgcggcgaaaaacaaaaaatgggcggtaaaagtcgcgcccgccgagaccgccgaggcggcggaaaagcccgtcgcgccagcctggctgccgccggaagagaaggcggaaaaactgtctcccgccgccgaccgcacgccgtggcaggagttcacattgcagggcggctgtcgactgcgcaccttctggcaggaaaacgccgccgccttattcatccccggcattgaatccggtagttgcgaaaagggcggctggctgagcggtcgcaccgtcatcactcaatccgttaacggtaaagaaaagcagagcaccgtgaccttcgtacatggtttcccggtcctgggtctcaatgccgccgctgaccccaataaacttctgatcaccgcggtcaataatcaacgcatggtagtcagcaatgaaaacgctcaacaaagctggatgatcctgccctatgtcgccgggcaaaacggttggcagatgaccggcacgctggctatcgaaatgtcccaggaactggccaacgatccgtcgcgtctacaggcgcggatagaggcggcgcgtagcgtctggacgccgtggctggcgccggatattaaactcaacgttgtgcttatcgacggcctgcacccgctgctgcgtaacccggcggtcggcgcatggcgcgcggcaaactaaggagcgacgatgaacacgctatatcaacagctggctggcgaaagcgtcggcgcggcgctgcaacgcctggaaagcgagatcaaaagccgtcccgccgatgccgatttacgtgcggcgttcgttcagtttctatgcctgagcggtaactggacgcgcgcgttggcgcagctaaaaagctggctggcgctgaagccgcaggcccagccaacggtcaccctgctggaacagagcattcagggcgagcagcagcgcgatgcggtatttgccggtagcgcccgcccgcagatgccggacagccagtggccgtggctgtctgcgctggcctccgcgctttgttccgattcagaaaccgcccagcgacagcggctggccgcctttgaacaggcgccccttaatcctggtaatctcaatcagacggatacccccgcggtcgcttttcactggttgatggacggcgacgcgcgtctgggcccggtttgcgaacttatcgtcaatggccggtattgctggctgccgttcgccgctatcgccgaaattcgttttcaggccccggcgagcgtcaccgatctggtgtggcgccatgcgctggtgcgcctgaccgatggaagcgagcaggtgtgtcagatccccgcgcgttaccctgtcacgccgcaggcggaagcacgcttccagttaggccgcgccaccgagtggcagccgctggacgacgaaggcgcgctgtatcagggccacgggcagaaagtgtggcttaacgataacgatgaattcccgattctctctctcgacgtggtgagttttgcatgaacaaaccggtacgcgacggtgacgcgctgcgcagcggctggcaggcgcgtagcaaacaagagaccattggtgcccgcgataagatgcagccgtcgctgctcgaccgcctgaccgataatcagccgcagaaaaaatcggagccgcttaacagcaacctgatcacccacagtacgctgcgccgtcacgtgctgcgcgatctgcagtggctgtttaataccatcaatcatgacgatccgcaggcgttggacgcgctggcgcacgtgcgccgttcggtggttaatttcggcgtcgcgccgctggccgggaaacggatgtcggatattgagtggcaggatattcagcgcaaacttaccgaggcgattatcagcttcgaaccgcgcattctgccgcaggggctgcaggtccgctgtatttctgatacccagtcactggatttacataatgtcctgtcgattgaaattaaagggcggctgtggtgcgtaccgtatccattagagtttctgttccgtaccgatgtggatctcgaaaatggccactttgaattgaaagacgcggggtaacgatggaaggcaaactgcttgaatattacaaccgcgagctggcctatctgcgtgagatgggcgctgaattcgccgaacgctatccgaaggttgccggcaggttgggcatgcgcggtattgaggtcgccgatccttacgttgagcggatgatggaggggttcgcctttctgacttcccgcgtgcagctaaaaatggacgccgaattcccgcgtttttcacagcgcctgctggagatgatcgcgcccaattatctggcgcctacgccgtcgatggcgattgccgaactgcagccggacatcaataaaggcgatctgagtaaaggtttcgtggtgccgcgcggtacgatgatggacagccaggtactgaagaaaaacggcgtcacctgtagctataccaccgcgcacgatgtcacgctgttgccgctgcgtattgagaaagccgaacttggcgggatccccgccgatgtgccgctggccgcgcttgggctcagccagcgcggcgccgtcagcgctttgcgcctgcgtataagctgtgaaggggctcaacatcttggtcatctgacctttgaccggctggcgtttttcttaagcggcccggatattgaggcgctgcgcctgctggagctgattcttgcccaccaggtcggcgtggtgtgccagaccaccgggcgcgatccgctgcgtttttcgctgagcgaagaggctatacaacaagagggtttcgccgccaaacaggcgctgctaccggaagatcttcgcaattttgacggctaccggttgctgcacgaatactttgccttcccggcgcgcttccgctttatcagtattaacggcctcagcaagttaatcggccagtgcaaggaagaaaaatccttcgatatcattatcctgctggataaaacagacgaccggctggaacaagtggtggaagctaaccacttcgcgttgcactgcacgccggtgattaacctgtttccgaaaatcgccgcccgccagtcgctgagcgacagccaacatgaataccatctggtggtcgataacatccgcccgctggactacgaaatctattcggtgagtaaaattcacggcagcgccgatggccaccgcgacgatcgcgagttccgtccattctggagttcatggagcaaagatgccggagattacggcgcttatttttcactgcgccgcgaacagcgggtgctttccgaacacgcgctgcgctatggcacgcgtaccggctataccggctctgagacctttgtctcactggtcgatgagcagcatgcgccgtggcaagaagatctgcgttacatcaccgccgaggtgctgtgcaccagccgcgacctaccgttgatgctacaacaggagctggggcaattcgtgctggcggattcgctaccggtaaaaacattgaaaatgcgtagcggcccgacgccgccgcgaccggcgctggcggaagggctcagcacctggcggctgataagccagctgcagatgaactatctcagcctgatggacggtgaaaatggcgaaggcgcagcagcgctgcgccagttgcttgggctgtatgccgggctggcggagaccgccgtggcccgccaaatcgaaggggtacgccactgcgtgctggagccagttcatcgccgggtgccggagccggggccgatcgtcttcgcccgcggtatcggcattaccttaaccgttgacgagcgcgctttttccggcgccagcccgtggctgtttggtagcgtactggaacgggtctttgcccggctggtgtcgctcaacagctttaccgaattcaccttatgtagccagcagcgcggcgaaatcggttactgggcgccgcgaatggggaaaagggcgctgatatgagtgacacgttggctaccattcatcgcctgacgccgctggcggacgttttctggcgcgaggttaccgccgcgccctggcgctacgacctttttcatctgctgcgccgcattgacgcgcaagggggcgaacgttatccgcttgggcgcgcgccgctgccgaaattcgaatcgctgcgcatcgggcaaacgccatcaatggggtttgcgcccgcgacgctggccagcgcgcagaaacgggaaaatagcgcggtgcatgagatatcgattctcagcttcggtctgttcggccccaatggcccgctgccggttcatatgaccgaatacgcccgtgagcgtattcatcatcatcaggacgacagcctgagcgcttttgccgatctctttcatcaccgcctgacgctgctgttctaccgcgcctgggctgacgcgcagccaacggtatcgttagaccgtgcggacaaccgccgctttgagcgctatctcgcctcactcatcggcatgggccagccggggcaactggagaagggcgacctgagcccgcatgcgcgtttcacccacgcaggccatctcagccgccatggtcgggatccggaaggactggagaagatcctgcgaaattacttcaaagtcccggtcaacattatcagcaacgtgccgcaatggatgccgctgacctcgcgagaacaagcgcaactgggggcgggaaggcgtttacctcgcctgggcgtctcggcgtttctcggcgtcgcggtacgcgatgttcagcataaattccgccttgaaatcggcccgcttagcgccgccgaatacgcccgttttctgccgggcgaaaacgcggtaaacgaattacgcgactggatccgccagtatcttgggattgaatatgcatgggatgtcagggtacttatccgcggcgatgaaatacccggtacggtcctcagcggcgacggcaaactgggttacagcacctggcttggccaccagccagcccccgcgccgcgtggcgatttagtgtttagcgtggagcagagcgacgcttgatgtcgtctgctctctgacacctttattaatgttatcaatggaaccgaacatgtcagaaatcagccgtgccgtactcttcggcaaactggatacgctgttgtttacctcgctggaaagcgcaaccgccttttgtaaactgcgcggcaacccttacgttgagctggtgcactggctgcaccaactgatgcagcagcaggacggcgatctgcaacacattatccgccatttcgcccttgatgagcaggcgctgacccgcgatatcatcgcggccctggatgcgctgccgcgcggcgccagctcggtctccgacctttctgagcatatcgatagcgccgtcgaacgcgcgtgggtttatggctcgctgaaatatggcgtcaaccgcatccgcggcggccatttgttaatagggctgctgaaaacctggaatctggctaacgttctgaaaggcatttcgccgcagtttagcaaaatcaatgtcgatgccttgagcgagagctttgagacgttgctggccgccagtaaagagagccagcaggcggcggtggaggcggccaacacgagcgcgacgccgacggcgcagggtacgctggcccagtacggacagaacctgacgctgcgggcgcaggagggcaaaatcgatccggtggttggccgcgatgaagagatccgccagatggtggatatcctgatgcggcgcaggcagaacaacccgctgctgaccggggaggctggcgtcggtaaaaccgcggtggtggaggggctggcgcggcggatcgccgcaggcgatgtcccgcagccgttgcgtaatattgagctgtggctgctggacatcggtatgctgcaggccggtgcgggcatgaaaggcgaatttgaagcccgtcttcaggcgttaattaacgaagtgcaatccagcccgacgccgatcgtgctgtttattgacgaaatccacaccctgattggcgcaggcggccagcagggcaccggcgatgcggcgaacctgctgaaaccggcgctggcgcgcggacagttacgcaccatcggcgcgaccacctgggcggagtacaaaaaatatattgaaaaagatccggcgctgacccgccgtttccagacggtgcagatccacgagccggatgaagataaagcgttgctgatgctgcgcagtaccgtatcgccgctggagaaacaccatcgggtgctgctgcttgatgaagctgtcaacgcggcggtgaagctgtcgcatcgatatattcccgcgcggcagttgccggataaagcggtagcgttgctggataccgcctgcgcccgcgtcgccgtcagccaaagcgcgccgccgccgcagttggaagattgcctgcagcgcattgccgccctggatgtggaactggagattgcccaacgcgagaaccgggtggcgattggcgatgcccagcgcattgagcaactcaaacaggcgcgtcagcagcaggaaactgaacgcgataccttgagtcgtcgctgggagcaggaacgcgcgttggttgatgaagtcatcgcgttgcgcgcgcaattgcaggaggctgatgacgacgcccagccggcgctgcgccagacgcttaatgaaaaacagctggcgctaaaaaccctgcagggtgagatgccgctgctgttcgcggcggtagatgagaacgtggtggcggcggtggtcgctgactggaccggcattccgctggggcggatggtcaaaaatgaaattgacgccgtactgagcctggccgacacgctcaaccagcgagtgattggccaacgccacgggctggatctgatcgccaaacgtgtgcgcacttcacgcgcgcggctcgacgatcccaataagccggtcggggtctttatgctttgcgggccatccggcgtaggtaagaccgaaaccgcgctggcgctggcagaagcgctgtacggcggcgaacagaacgttatcaccatcaacatgagtgagttccaggaggcgcataccgtctcgaccctgaagggcgcgccgccgggttacgtgggttacggcgaaggcggggtgctgactgaagcggtacgccgccgcccgtatagcgtggtgctgctggatgaaatcgagaaggcgcatccggacgtgcacgaaatcttcttccaggtgtttgataaaggctggatggaagacggtgaaggccgccatatcgatttccgcaacacaatcattatcttaacgtctaacgtcggtaccgagttgattagcgctatgtgcgccgatccggatctgatgcccgagccggaagcgctgagcggcgcgctgcgtcagccgctgttacaggtcttcccgccagcgctgcttggtcgcctgttggtggtgccgtactacccgctgagcgatgcgatgctggggcaaatcgtgcgtctgcagctggcgcgtattcagcgccgtctgcaggacaatcacaacattgtctgcgagattgacgacagcgtcgtcgagcaggtggttcagcgttgtaccgaagtggaatccggcgggcgtatggtcgatgcgattctgaccaacacgctgctgccgcaaatgagccaaattctgttaaccgccaaccgtaacgatgagcagtttacgcaactgcgcatcagctatgcgcaaggcgagtttcattgtcagtttgccgcgtaacaccatcagaaagtgagtcttaagatgacggatcacgaaaacaatcggactgtcctgaacgcgctgccggtcgggtatcgttttaacgaatttgaaataaaggaagtgattggcggcggcggtttcggcattgtgtatcgtgcctgggaccatcagctggaacgtaccatcgcgataaaagagtttatgccttcgtcgctggcagtacgtaacgaagatatgaccctggtactgcgtagcgagcgcttcagcaaagcgttctccgccggattaaacagctttatccaggaggcgaggctgctggcgcgctttaatcatcccaacttgctgcacgtgctgcgcttttgggttcagaacgacaccgcctatatgggcacgctgttttatagcggcaccaccttgagccgcctgcgcgaacagcagccaaacctcatcgatgaggcatggatccgccggatgctgccgatgctattcggcgccattaaaaccattcacgacgccggctatttgcatcgtgatatctcaccggaaaatatccagatccaggataacggcctaccggtactacttgatttcggttcggctcgccggaccatcggtaatctctccgacgaaaccgaaaccatgctgcgcccgggttatgcgccaatcgagcagtataccgacgataatgacagcgaacagggcgcctggaccgatatttatgccgtcggcgcggtgctgcatacgctgatcgtgggttcaccgccgccggtgagcgtggtgcggagtattcaggacaactatcagccgctggcggaactgaagccggcgggttactcgctgccgctgctacaggcggtggataaagctctggcgctgcgggtggaagatcgtccccagtcaatcgacgcgttcgccgagctgattgaaatgccggtgtccagtatcgatgacgtcttgtcggtcaaaaaaaccggcaccatgctggcgctggtcgaagaggaagaacaggcgccggccatgacagactggcggcgttataaggttccggggatggtcgccgcaggcgtactggtcggcattattgccggcggtatgctgttcagcggcggcggcggcgagacgcaaccagcacagagcgccagcacccagccgccagcggcggttacgccgccggtaacaacgcagaccgctaacgcgcagcccgctccgcccgttgctgttcaagagagcaaacctgccgccgcggcggcgcctgttgctcaggtttacgtgcgcatgcgggaaggggaaaagcttaaactcaatggcgaacctcataatacgcaaccggccacaaacggcttcgcctcgctgaaactggcgccgggacattatgaaattaccctgcagggtaatggacaaacccgcgagcagacgctggagatcgccaaaccgggaacctggcttattaatccatcgagctagatggcgcaattgagagcgaaatccacccgccagaaatgcacggcgggtggctaatcactggtcaacaaggagtgtttaatgacgccaggctggattatcaacgcagtattgacgctggttattattttcatcagcttttaccttgccaaccgcatagtaaaaaactcgcaacggcgggagcagcggattatcgaaaacgggaacgatatccaggttacgatactcgcaatgcggcaaaccggattatttatcaataacaatcctgtcattgatatggatctgcgggtacaggatttaaataatggaaaaacgtggcttgtggaaaagcaccaggaaacggttttgctcattaccctcgatgcctggcaggtcggagtgacttatgaggcaaaactagatccaaaagataacgccattgtgtttgtaagagatattaacgataagccaaaactgacgagtggaaaatgagtgtttttactaacgtaatcgttctggccgtggtcctactgtttatttatatttttgcgtcattactgattcgcgatgcgaaaaataaaaaactcaaagcggctatccacaatgatggcgttgcggtatctggcaccatcacaaatgtgagaagccgctcgggcggtaattccgggtttattaatattagcgtcgattttaattacgttaacgaaaaaggtgaattgctgaccggtcagcgggatatcgttattgatattacgcgtatccaaaactttcaaccgggaaagccgattccgttacgctacttgcgccttgacccgcaacaggtgctggtcgatctgccgaacccactgttaacgcgcagctagtgctgcacaaactgtatccccctgaatggaataatattatgtctaacaggatcaccgttcagctccccgttgaggggctgcttttctggaaactcagcggacatgaagccatgtcggaaatgttcgagctcagcttaacgctgcttggcagcgatgcgcgtctggatcgcagcaagctgcttggccagccggtcaccgtgaccattccgacgcaaaacgcgctgagttcgcgttatttcaacggtaaaattacccgcgtggcggtgagcgccgttgaactgagcggtatccgctacgccgcttaccaactgaccgttgaacccgacttatggccgatgaaacgcgaccgcaacctgcgtatattccaggggcagacggtaccgcagatcatcaatacgttgctgagtgaataccaggtcaacgttgaggataagctgaacggcagttaccgcgtctgggattactgcgtccagtatcaggaaagtagtttcgcctttatcagccgcctgatggagctggaggggattgcctaccatttccgccacgaggcgggtaaacatacgatggttctgaccgattcagccacccagcatcaaccggtaagcggctatgaaaccattccctaccaccagacggcatcgggcggtattaccactgaagaggggatcggtcagtgggcgctggaagatagcgtgacgccggggatttacagcctcgatgactatgatttccgtaaacctaacgcctggctgtttcaggcgcggcagaacccggcatcgccctcgccgggcagtatcgacgtgtacgactggccggggcggtttgtcgatcacggacacggtgaattctacgcccgtatccgccaggagcgctggcaggtagaacatcagcagatccaggcgtccgccaccgcggtaggcatcgctcccggcgcaacgtttaccctaaccaatgcgccattctttagcgataacggcgaatatttgacgaccgccgcagattacttgtttgaagagaacagctacgccagcggcggcaatagcgatatctcgcaccaaatccattttagagtgatcccctcttcggtggtctatcgcccggcgcaggtaaccgactggccgcgaacctatggcccgcagacggcgaaagttgtcgggcctgaaggggaaagcatctggaccgacaggtatggccgcatcaaagtgaagtttcactgggaccgccacgccaaaggcgatgacaccagctcctgctgggttcgcgtgtcgagcgcctgggcaggccagggctttggcggcgtgcaaattccccgcgtcggcgatgaagtggtcattgattttatcaacggcgatcctgaccgcccgatcgtcaccggacgtgtgtataatgaagccagcatgccgccttgggatctccccggcgacgccacccggatgggctttatgacgcggagtaaggatgggaatattgataacagcagtttcttgttcttcgaagataatccgggcaatgaatccgtcgagatgcattcagagaaagatatgaagatctcggtagagaatgataaatatgtaactattgatggttcccgtagcactgtcatttcaaaggaccagagtgatgatgttacaggtaaggcaatttttaactatcataatttacgaactaccactgttgatatgaaggaaacagaaatatttaaaaatgggcaaaaagtagaaattaccaatggacgcgagtttgaaataaaaagtggcggcgatgatatgaaaatcaaagggaatcgaaaaaccactattactggcgatgaagaacaccatgtaacaggagtgataactcagaactttgataatggattaataacaaatattaataaaggtgggaaatctgaagtcattaccgatggtggactctccgtgcatgtggatggtggtgactgggtgcaaaaggtacaaaatggcaaaatagatatttcgtcaccaaatgcagttcatattaaaagcgattcatcagtaactattgatgcgccaactcaattggttactgcaaaaggttataatattgcgtttacaggtatttctatttcaggtacagggaaaagtatatcgatgaatgctgttagtacatcaattaatggagcaagtttcagttggaccccacttagtatatccacatctttagcaagtgtcgttcatgcgccgatgaactatcagcgttcattaacaaagatagaagattctatccaaaaccttgcaattggcgtaatccatatgtttatttaaaaacgaataggtctaacaatgaattttgtttatcaacactctttgctaattgttattgcatcagttgcattaagtttctttctaatttttagttcgttgcgaagccttaagggacaaggaggagatcttactgaaataaaaaactggctaagtcgtgagcgctggcccggtgagataaaaaacgcatctctggtaagttggcgtcaaactaacgcgaccaataattttgattattattttgtatttacctttgaggcgaacattgagggtacgacaaaacagtataatgctgctgccgtagtacgtgcttcagaaatcccaaaattaaaaccgggacttcaattaactataaagcatgagggcgttccgccaaaacgaatggctgttatggatgtggattatgaataaacagggcatctcctagacttctatgctcgtggtcatttaggtggccacttaaaaacactcacagaatttataatatgtggtgaacttcattattaatggatcattatgtttgactctatgtggggaacattaatactagccattgtgattttgtttggcttgttcttatattgttatcgttcaggctccaattatgataagtttaaggcaaacggtattcgcacagaggctaaaatattaagcatggaaaaaattggcgcgagtggcggagggagcactaaacttaaaatggaattatctttcaatactgactcagggttggtgacggcaacggctaaacagtatatttccccgcaaaatatggtaaaaattatgaggaataatactatctacatctactacatgcctgataatcccaaagagttattaccaacaccatgggaaatggaataataatatactactcatttattgagaaaagagaaggagaattgcgcgctatttcttgagattttatgaggttatggtcgtgcgcttaatgtaaggttttaagatgtcgaactcaacaatgtggtctatctttataaccattttagttgtggggtggttcttatacagtataatgaagtcaggaagtaatgatgagaagtttcgtaaggaaggcattaaagttgaagctaaaatcattagtaaacaacatataagtacctctggcaccggaaatatgaaatttgattttgaattggaatttatgactcccgatggagttgtcgtcacacatgctcgtcgttttataactccggaagaaatggctaaaattggtaggaaaaatacagtttgtttatattacctcccaggtacccctgaaaaagtctaccttgttcctggggatatggagtaagctatcgatgagggtttttgttaatagcacggatgcaaccctatgaatgttatgacggaaccatcttttatctttggcattgtgatgacattcatagcattaggtatatcatttgctgcattcaaaccgaataaaactgaagtttcagcacttaaaaactggttgtcgagagataagtggtccggtcaaacaatccaggttccggtagaatcatggcgtcagacagaaacaaagtacggcaatgattatatttatgatttctatttttgtgcaaacataaacggttctgtgaaaaaatacattgcgaaaggcattgtgagacctaatgacattcataaattaaagaaaggaatgttattatcagtaaagtacagtaatgacacgcctgtaaagatagcggttattgctgtcaattattaaattgtaagccatgagcaaataaggcttgtcacaatggatacactcttttttgtcgtcatggggctgattgtcctggtgtttggtatctatcccatggcccgttttctttatcaggatgtttacccatatttaaaggatagtttcacccacagtgaggtcctgcaatcagggattgcggtcaacgcggatatcattgccgcacaccagaccagcgcctggagcggaagtaaaccgatctatcgtctcacctttaaatttaagacccgcgagcaggtggaagtccaagctagcctgaatcacaccctgaatttcagcgacattgaacgttttaagccgggtaatggcacaacgattaaatacgatccggcgaacccgcagagaattgcgctatacgacaggccgctttttttgtaatcccgctattttcccatgcacgagtctcatttcactgattactcagcaacgtacaaagacctcctatgaaaatcattaaacccttacgcctgagcgtactgaaccggccatttcgctggcagggcaaaaattatcttggcgtttcggtgctggcgttggcggatatggggccaaacccgcagctgcgccccgagatggaactgtggcagcttgccgccgacgaactgcaaaccagcggcggcgtggtggatatggccatccctaaagtccgcgccgaatttcttgccaccggttttgcctatacccatcatcagcaggaaaaaagtgcctgcgtggcgcgcatcgatatcgacaaactgagtaagtcgttggtggtgttcggcgatcgcgagtggacggggcaacgtatgacccgaccgcagccattcagcgaaatgcgcctcgactggagccgcgcctttggcggcggtgattatgccgacaacccgcacggtcttggtgtcgcgccggtaaaacagcaggggcgcgaacatcatcctctaccgaatattgaaccgctggagggaagagtaagctcgccgcagcagaaaccgcagccggcaagttttggcccgttggatatccagtggccgcggcgctttagccgaatgggcaaaaaatatgatgctagttggctacaacaggagtttcccggttttgcccgcgatattgactggaaagtctttaacgccgccagtccggaccaatggtgggaggatcgggataccttgccgccaggggcgaaatggcggatctggaatatgcatcctgagaaaccaatgcaggagggccagttgccgccgtggcaggctcgctgttttattcatcgccagcgcgcggatgaaacgctatttgaagaaattgccttacgcgccaccacggtatggttctttccccatcgggaacagatgatgcttatctggcaggggcacattcgtatcaatgaagacgatgccgccgacgtcctgcagctgatcccggcgctggaaaaagagggcgccgcccgttcgcttaatcactatcgcaaggtactggcccagcgaatggataaagagaagggcgcgctcttctcctttcgtgaaaaagatctcataccggaagagaccatcggcccgtggatcgacaatgaaattgaacagtcgccgagtccgcagcaggagaatatgaaaaaccgcgcccgtctgctgcgtgaacagcaccgcgccgccatcgaagccagcggcggtgatatcgatagcctgttggcggatatcgacgaacccacgttgcctaagcttgaagacctgccggagtttatcgccgacatggagcgtcaggcgcaggaaatggagaatgatgcacaacagcgcaagcgtgagatggaggcgcactatccgcagttgaataacgatgaaaaccaaccgcgcggccccgaatccatgcaccggatgcaggagatgctgcatcagcaccagcacgaactgagcgagaaaaagcgcgcgcaaacgcgcgaggcgctacatcagatgtacctggccgcggtgcagcatcagccgccggcggtccggctgaagggcgatctggcgatgatcctgcgccaacgcgccgagcgtaccatggcgcagggcggcaattttagcgggatggatctgaccggcgttgatttttccggcatggattttcgcggcgccaattttgaaaaggcgttactggaatgcgcggacctcagccactgtcagctggataacgcctcttttcagggggccgtgctggccagaacggagctacagcattcgtcgctgcgtaactgtgattttagcggcgccagcctggtactagcggagtgccatcaaagcgacttcaccggcgctcgctttgaagatagtcagctacagaacgcgctgtttgcgcaatgcattttcgataacgcgacgctaaaaacgctgatccttcgggaaatcagcctgattgactgccgttttcatcgcgccgagctggatggctgcgtctttatggaactgacgctggcacaacctgatttcagccacgcgcggctgcacaaatgctcgtttttacaatctgaactggagcatgccattttccatcaggcgacgctggaaagctgttcgctggtgcagaccatagcggagcgcgctgattttagcgctgcaacatggctagccagcgctgcggtgtcggaaagctcacttatcggcgccgacttcagccacgcgacgctgcagcagagcaatttacgccagacgccattacagggcgcgcgctttgcgctggcaaaaatcgaaaacagcgatctgagtgaggccgattgccgtgatgccagctttatacgcgcgaatctggtcggcagtctgtttgttcgcaccgattttcgcgaggccgattttaccgacgccaacctgatgggcgcgttgctgcaaaaaagccagcttgccggagccaatttcgaaggcgccaacctgttccgcgccgatctttcacaatcctttaccagtaaaaccacgcggctggacggcgcatggaccaaacgcattaaaaccctgccgaagcgcgatggagaagtgatatgacgatactgagcccggaggagatcgtgcagcgcatcaaaaacggcgagccactcaatgaaatatcgctggatggtatcaacctgcagggctgcgatctctccggcggtctgtttcaggaggtgtcgctacgcggcgctaatctgcaaaatgccaatctgcatgaagccctgtttaccgagtgccagctgcagaacctgcagctgcaaggcgcccaacttaagcagacgaccttcaatcagtgtgaaatggcccatcttcaggccgccgaaaccacacttgatagttgcgtgtttaatcagtgcgacctgcaagagagcgatttctcggcgacgacgctgcaaagcagccagtttatgcgttgccagatgagcaggagccgttttcgcggttcaacgctggaacgcagcgtgttttatgaggctgacctgactcacgccagctttgcgcaaagccgcggccggttgaccaccttttaccatatcgatttgcgggacaccgcgcttgacggaatccagtgcgaccggctggtgtttttccagtgcgatcagcgcggcaaagactattcaaggcagggttttaccggttgccagttcaccgattgtccgctggacggcgcgaagtttaacggcgcccagctaacccagtgcaatttcaaaggcgcgtcattgcgtgaagcagaactcaatcaggtgaacgccagccaggcgctgtttatggaggccgatctgcgcggcgcccagtgtcgcggcagcctgttcgaccaggcgatatttgtcggcgcgatactggagcaggccgactttagccagagcaggttgttccagagcgttttacagcgggttcaggccgccggggcgcgattcgcgctctgcgatctgacgtggagcgatttttccgccgccgacctgcgccaggcggatctgcgcggtgcgaccttttcccgcacccgactgcatcgcgcccgccaggacgaagcgctgtttactggccgccaggggatcctggaatacgatgaagagttattagccgctgaggcgtggagcgcccagcgccacagccgttgttaaggagacaacagatgacaaccattaatcacaaactggcccaggcggtgatgccgccggcgcaggcttccggcacggtgacccattgctttgccgacggtagcgtgaccgtcgagagcgaagggcgcggctggcactgtcggcgagcggtcagttgtctgatcgcgccgcaggctggggatcgcgtactcatcagcagcgtggacaaccagatctggctgttagcggtgctggagcgtgatgaaagccgccaggcggagctcagcgtaccgggtgacctgcatattcaaagtcagggagaactcagcctcagcggtcagcgcctgtgcgtcaatgccgcgcagggggactgccatatcagcgagatgaactacagcggcgataagctctcggcatgggtgacactgtcacgtattgttggcaaacgcgccgaatcggtctggcaaacggtgacgcaaattagccacaatctgctgcgcactacccggcagaccgagcaggtgcgcgccgggcagttggatatgaaagcggaagattacgcccgcctgcatgcgcacaatacggttatcacctcaaaagcgatcaccaaagtcgattcagaacagatccacatgggctaaggagctaattatgtttgctaactgccagctattcggtgtcgatttagccttccccgacgtctgtctgaccccgatgccagcgccgacaccgattccctatccggacatcgcgctggggccgacggcgatccctaacgcgctcaatattctgtttatgggcatgcccgcgcacaatatggcgacggtgacgccgctcaccaacggcgataaccccggcgtagcgaccggggtggcgtcaggtacggtaatggggccgtcgcgtcatctgaccggcgcatttaccgtgctgttaaaaggcacgccggcgacgcgtctaaccagcgttagcctgcaaaattcgacaaatgcggtcggtatgcgcatcgtccccagccagttcaaggtattgatgctggcgccgtaggaaacacgttccagatgccatacctgaacatcattctcgggaagcctttttacgatctcctgcagcatggccgggagatagaccgcgctattgcgcgccgggacgccagcttgctgaatcactccacgccagaacttgaacgctacttttcgcgtccacctggcgaacgtccccggcaaaacccatttccggtcgccgcgctattcccactgttcttagtggcttttgcattcaatctgctaccatttttgcagacgttcccgccattctctgcgccgatacgggtagcgagtttctttgtaccagcgctagtggtggttatttttctgttgaccagcggcgtgttgctggctcgcggttataccctcgggctgaagggatttctggcgctatttcttcttctctcagcgtcaacggcggcgcaagcgttgagagcgatggtcagcgcaggtgaaagtctctggccgctggcgttcgccgcgctggcattactatgttgccggctaatatttaaccgccaggaattcgtgctgttcacgatttattgtcgtagccatcggttggctcttctcgcgggcaaactacgccggcagcgcaaatagggagtggtaaaggcggtgagcaacccctgactatcaacggatagccagggattttgtttattgcgggtaattaaacgcgtcaggatggttttcaaggctgccgctcagcgcggcaaacaacacggttttaccatcaatcgacagcgcatcgctgacgttaagccaggtcagtttttcttgcgatgttttctcatcaaccactgagaagacgcccgccatctgtttggatttttcagaccagatcacggcgatacgttcgcttccacaatcgtgtggtttacaggcgcttaatacctgccaggattcagatcccagtttcacggtttgtgccggggatccggtaccaccactgttaacccaagccgggagcttatggccttttaccatctggctgaacgacgttttggtcgcattatctttggcaagtgaagtcagcgtaacatcgctttgcgccataacgctggcggatgcggtgagtgcgacgatggcggcaagtgctttgaacatgtttcctcctggagttgatatgtcctcatttcgggccccttaatagtgggcgcagagcatcattaatgcaaatgaacatatttatacaatgaatgtgatcacccgcgcaaagcgtggacttatccggcttggacatgtcatgatgcacattggttaaatttttgtattaatagccgagagtgaagggctaatacaaaagggcatatttattcaggcgataacgcatggcgtatttgaatcatctgttgacgtttattgaaagtaatccggcattagcgatcggctttaaccttattctgctggtcgtctccggcatctttgcccatcttttgtgcaagtttttgctgattaaagtgatacgcaaggtgttcttcgccagccataaacaggacgtaccgctggaaaaagaccgccgtatcgccgagaaactgtcaaacttcattccggttattatcgtctactatgttctgcagtttatgcccaatatgccggcatcgctggtaacggcgattaataccatctgcggaattttgttttttatttttctgtcgatctttttcaacgaaatgctggatatcgtcaatagctcttatctgcgtaagaccaagcgcaaaaaccattccatcaaaggctatatccagataggcaaaatcttagttcacattctggccgcgattatgatcctcgccgtgatgtcgaataaatcaccggtgattatcatttccagcctcggcgccgtcgcggcggtgctgatgttagtgtttcaacataccttgctgtcgctggtggccaacgtccagctatcgtcaaacgatgtcctgcaactgggcgactggatcgaaatgccagacaagaacctgagcggggaagtgacggatatcgcgctgcataccattactatccgtaactgggacaacaccatttcgcgtattccgaccaagaatttccttacagaaacgtataccaactggcaggcgatgttctcgtccggcgcacgaaggatcatgcgcagtataaatatcgatcagcactcggtaaccttcctgaatcaggagatgttaaccccgatgctggcaatccgcggggtgagtgagccgctcagtaaattactggatggccgggatccgggcggcgtcgcggatcgctggtttattgataacgggttgactaacctgacgctgtttcgccattacctgatgagctatctcgccgaacggccagatatcattaaagatatgtacatcgtggcgcgaacgttaaaaccgtcgccgtccgggctgccgctggaaatctactgctttacctcctcgacgctgtggatggattacgagaacacccagtctgctatttttgaatacattaccgccgtggccgggcagttttcactgcgtctttaccagtatcccgccgggcatgatttctggcgcttatcgcaggaaaacgccagccgcgccagttcaccgccgccaactgaggggtgaccgggagatggcaatcgtgttgagaaaaatgcgggcctccgatattagcggtggcctgatgcttagccagcagatgggttggccgcatcgtcgtgaagactggctgtgcgccttcacgctaggtgagggtattgtggcggaagtagaaggcgaactctgtggcacgacgctatgctggcgctggggtcaacatcacgccactatcggcctggtgctggtggctaaacagctgcagggtaaagggcttggtaagaagctcttcgccgctcaattagagaggctgggcagccgcactatccaactgcacgccacgcctgccggagaaccgttatatcgtaagtttggtttccgtccggcaggatttctccagcaatggcacgcccacgcattacctgccgttgcttcttcgggcatcggcatctctgccgcgacggtcgccgatatatcacagctagctctgttggatggcaaggcctggggcgcccaacgagagcgtcttatccgctggctgctggccaacgcgcaccttgccgttatccgcaatagccaggagcagatttgcgcctgggccgcctgtcgccgcatgggccgaggctatgtaatcgggccggtggtggccagccgaagcgatcatgcgcaggcgttatgcgctagttttctgacgacgcttgccggcgagtttgtgcgcctcgattgcccggaaggccaacatgaatcgtttacccactggcttgggcaaaacgggttcgcgctggcggatcggccgttggcaatggtgaagggggatatttgccgctacagctatgatgtacgtctttttagcctgatgtcccaggcgatggggtaagtggagtaacaacggccattcggaataatcctgaatttttatatttctatagcaattaacctttagggcataaaatagatgcccatatgcatggagagaatcaatgacaatgcctggagagtttgcaaaaaacaatttacccgattatggatttgcaaggagtctgggactgacctcaggcaatgattttgattttaaggctctggccaatcaattggattgttcccgagattttaaccatgcaggtattatttattctgacggtagccagcagtggcttgttagaccgtccagaaatattgctcaggaaaataaaagcaccgtcacccacgttatcgttacccgaataaatgctcaaccttcggcatataatgccaccaaagcactaaatcatacgattcagacgccatccctggcaaacgagatcacctcaacggctatttcatgcggtgcggctgtcgtaacgggagttttggctgtcggcgcaggtgccgccgttccaataaccgcaggggcatccggtgttgttgctgcgattattactgcgggaacggtagctacagtcgcgcaatgttttattggtttaggtcgtattaccctgattgcaacagatcatgatgatgtagtcacatggctcgacagcgaatcatggtatgtggcaacaagtaccgcattagatattgtttcgcttgcgggtgccggagctgggctgagaagcacgatagaaacatataagatgatgaaagctagcacttcaacgaatgtgataacctggcttaaagggctaaaccgtgcggaacgtcgccgaattacggaagaaattattcgtgcgcaaaaccctggaatatcgaatacaggaatgaaagccgctatgcgtgcagggttttatcccaaacgctttccttctgatgccttacagcgaagcttacaacgtgaattaaccacggcggtagtgaatacctccgcatttgcgggtagcgccatgactggaacaatccgtaatccgcaaaatatgagggcctcaacacaatatgccattggccttattcagtcattctccttgttgggaactcattaataataatcatgaaatatattaccagaaaccttattttaagtgccgttgtttctcgaaaaatggacactaacgatccgcagcagcttgaaaagcttaaagacagattaaaagaccggatgggtattccggtcggctggcatatgtcaggaataccgctggtaggggctatgattctgagcatgttcgcttttgccctggctcaaccttatctctggttggcggtgttcgagctatttgggctgccgcagtatgccgtgatggcggcgattgtgcctgtatcgctaatttatagtctgataatggtactgacgatgtacttcgttgccagaggcaattttctggcgcttaaattatcactggctttgatggcttttagcggtctggttgcgattgtttattttctttctgtttgcctgggggcattattcggcgccggactaaaaccaggatttctcattagcgccgtgctggggctagtattcattttaggcggtatccgatgcattaatagccagactttttaccgtgcaaacgccctttatctacataacagggtctggcgaaaacagcttaatattcagcgccagacgctgcgccgcgcttcacgttagaaaagggcggcaataggccagttttagcctggccttattttataaatcaataagcagattcgtgctgcggctgcgggagcagcacagcgcgacatgctgcacgatggcgcatttttctgctgctgactgcaccgtatcacgatgatccacctctccctcaaccaccctggtcagacaggcgccgcaaatccccatctcacaggagagcggcactgccacaccattttcctgcaatacctgcgcgatggtttgattggcggcgacaggccagcactggccagaagaggcgagcgtcaccgtaaacgtctcttcctgccgaacgtcgttggcgggcattgacgcctgaaacgcctcctcatggatctgctcagcctgccagccttgtagggccgccgcctggcgcgcggcggccataaatcccgccggaccacacaggtaaagccgatcctcacggtgaggaacgcgcaatctgccagccagattttctcgcggactctcgccttcaactgagctataaatcctcacgttttcaggtgccagcttgccggcaatcgcggctaccagggcgccgttttcccgtcggttaaggtaatactgtaaggtaaatggctttccttgcgccgctaacgcccgcgccatgctatacagcggcgtaatgccaatcccggcggccagcagggtgacgtgtcgcgccgtctgcagggcaaactggtttcgtggtagcgaaatcatcagcctctgacccggtcgcagcgtctcatggatgtagcgcgaaccgccgcgcgactctgccgatcgcgccacgcaaatcagataacgttccagcctgcgatggctgccggtgagtgagtactgacgggtcacgccgttcgccagatgcagatcgatatgggcgccgggctgccatgcgggtaatgggtcgccgtcaggcgtcaccagcctgaccgccagattatgttttccttcacgccagagaccatcgacaaccacctcaattagagtactcatcatataactccttgctcagaccaggaaaaactcaccgaaacccagccgcttcaagccgcgacggtaggcaattgagctacggtcggctggaatatgtgcttccagggtaagatccagaggtagcgtctccgggcgctggctctctaccatcagccggtcttcttcaaaaacgcgaaggttgaaggcgtagacctcctccaccggcacatgcaggtcgaaattgcgggcgattggggcaaacatccgcgtgacccgtgatgagacgggcgaggcggcattcataataaccagccgggcttcgccgggaaaatgaatcgtcagggtggcggtaaagggcagatgcatctcaaagcgacgcagccattgaaaaccctccggagcccggtaaccggcgcttgccggataattgccgaccgtgctccagtagtcgacgacaaacccgttttccgtttcctcaggcaggtagtcaggaacctgttgattctccgcatcggcgaaggtgtcggtatggatccacgcaaaatgcgccacatcaagaaacccttcaacctgacggcctgcaaagccattgacctcaaacgccgggcaggtcagttgctggaatccgtcgtctgcccagtgcggcatggtcggtaaccgcgggggattgtcagcatcataatcgagacacacccacaccagaccatagtgttcttccgccgcgtagcaggtcagatttaatttcgctggtatcggctgatttgggctggaggggattcggttacagcggccatcttccccaaagcgcaggccgtgataagggcaaataatgccttctgcgtcatgaaaacctaacgtcaatggtaccccgcggtggggacagacatcgcgggcgactacgactcgttcgtgcaggcgatagataatcagtttttcatccagcagggtggctttcaccggttgcgggccgatatcagcgctgcgcgccaccggatgccagcattttgccagccgcagccagtcctggggttcaaaggtgcaatgcgcggggggcgcgagcggttgtctgttcatcgtcttgcttcctgatggctaagttgattgtttaattgttgtgagtttattgttgccatagtagggtgttgacatccatcagcattaattcagctatccgttgcaaaaatcagtacaggtaaccgatgagtcctttctcgcgctttgcgcattattttatggaagtggcccgcagcggcagcctgcgccgggcggcggaaaaactgcatatttcggcttcggcgattaaccgccagatactgcaggctgaagcgtccttcggcacgccgctgtttgagcggctgccggaaggtttgcggatgaccaccgcaggcgagctgttgtatgacaatctgctgcgctggcaaaaagagtttcgcgtgacccaacagaaatttgatgaactgcaggggctaaaacgcggaacggtgaatgtcggtatggtgcaggcgctggccgaagggagttttgccgcggcgctggcagagattatcaaccagtgcgagtggctggaactgatgttgcaggtcgccgatagccagagcatcagcgacagagtgcgtcaggccgatgtcgattttggtctgatcctcgatcctgaaggtcaggcgggtctcaacgtactggcgtttattgaaatggaagtcggggtggtactgcatccgcaccatccttttgccgccgcgcccgcgatctcgctgggggaacttagcgatgaacggcatattattcccggcgcgccgttaatagtgcatgaccgggtggcaatgctctatcgccattatgatttttcgccgcccaacaccgttagctgcaatgatattcgtctgattaaatcgctggtgcttaaaggcggcggggtgacggtcctgagcctgctggacgtgcaggacgaggtaaacaacggttcgctggcgtttgtgccgctacgtaataagctgctacggcctttgactctggcgctgtgcaccgcgccatcgcgccagctatctcgtccggcgcaaatggcgattcaaaaactaacgctagtgatggaggagatgcgtagcgctgctcactctcagcctaatggcccgccctgaatggtttcgcacaagccgttgataatacgctcgccggtttccgttttcagttcctgataccaggctttggttaacgccatatccttaccgtgggtgatatcacagcgtttacgcgctttgagcaccaggtcacgcacccgttcacaacgcaatgcttcgtactggcgcagcgcggtgacaatatcgctattgtcgcgcagtacattacccagcacgaccgcgtcctccatcgccgcgcagccgccctggccgatatccggcgtggtgctgtgcccggcatcgcccagtagcgccaccttgccacgcaccagcttatcaaaaggttcaatatcgtgaatttctatccggttggtagtctgcgggtcgagtacggcgataagcttttgcaccggcggcgcccagccggcgaagtagcgggttaaatcgtcgcgcagggagagtcgatcttccgctaacccggccggtaacggcacatcgaagaagaagtagaagcgtccgcccgccaccggcatcagcgacacgcgtttgccttcgccgacaaacgtcgtccactgatcggcgggggcaatggactcatcaatgtcgaccagaccattccagttgacgtaaccagcatagcggcgttccggcgtatagccgagcacatatggccgcagtgccgaatggctgccgtcggcggcgatgaccatatcgccgtgcgcctcgctaccatcggtaaaccagacggtgacgccgtcggtatgctcttccacgcgggtgacccgcttgccgaactgcacctgctcacgcccccagaaatcaagcatctcacgctgaagttccgttcgcgacactggcgaagggcggccctgcgtacgttcaaccagcggcgcgagactgaaccgtgtgagcgtttccccgtgttgatactccttatacgccagataatgcatcgggccgccataagcgtcgatgatctcgcccatccccaggcggttcatacacttgacgccgttgggccagatagagatcgcggcgccaaccggcttaatctcttttaccgcttcgaacacttcgcaggcgatgcctgcattacgtagcgccaccgcggcgctcaacccgccgattcccgcgccaatcacgattgctttcattgtcttccccttaggtgtgttgtttaaggggttcagcaatttgcataccaggtagcagaacctgcgaaatcagcggaaaacggacgggtgatggcggggagatgcaccaaaggagggcaaatttgcgattatgttgcctttttatgaatcaaagatttcttttgatgaattaaggaatcaaaagtttcagcgccccgcgccaacgatcgttacagaatagccgctctttaatttagctatttcactgataaataaaagataaagcgattgttacgtggataaagatagagggaataagcaatgtggcctgctttgtgcactacatcgtgaacgcttatccacgacgagacggtgaccccatgtctgatgaaaagaacagcaacctgctttatggcctggagcagcgcatcccgccgctgccggctttttttagcgccttacagcatgtgctggcagggctggtcggcattattacgccgccgctgattattggcgccgcgctggggcttggcgaatggctgccatatttaattagtatgtcgctaatggcttccgggattggcacctttctgcaggctaaccgcgtctgggggatcggtgcagggatgatctgtatgcagggcaccagcttcgcctttctcggcgtagcgattgccggcggcatgtgggtgaaagcgcagggaggcggcccgcaggacattatggccatgctgtttggcgtcaacgttgttgccgcgctggtaccggtcgtcgtcagccgctttatcgaaccgctgaaaaaactttttaccccgattattaccggcagcgtcattgcgctgatcggcattagcctgataaaggtcagtattattaactggagcggcggcgagcacgcgaaggattttgccagcccgggcaatatagcattgggcggcataacgttagggattatcgtggtgctgagctgcgcgaaaaaccgctggctgcgtttatcgtcggtggtcatcggcatggcggtgggctgtatcgccgccgcattgagcggaaaatttcatctggcgccgatcggcgatagctggtttcgtctgccggcgatatttccttttggctttcagtttaatagcgccatatttttaccggtcgcgctggtatcgctggtttgcattcttgaagccgtcggcgatttaaccgccaactgcctgatctcaaaacaggccatcgatgacggcgcgtttcgttcgcgcctgaaaggcgggatcctcgcggatggcattagctgcctgatcgccgcggcgatctgcgcgtttcccaataccaccttcgcacagaataacggcgtcatccagatgaccggcgtcgccagccgctatgtcgggcgttatattggcgtattgctgattctgcttgggctgtttccgccattcggcgaggtcctacgccagatccccacgccggtgttaggcggcgcgacgatggtcatgtttggctgtgtcgtggcggccgggatccgcattatcacccagaacccgctaacccgccgcgatatgctgattgttggcctggcatttggttttggcctcggcattgaggcggttcccgctttccttgcccatttcccgcccatcatcggtaacctgtttggatctgcggccaccagcggcgggctggtggcgattgtactgaatctgattattccgcaagagaaagccgccatgacggcagcggcaaggagcaatgatgataacactcaaccactttaatcagttgccgcaggcggaagccattcgccagcttgaaccctgcgtggcgctacccgcctggcgcgaagcgctggcgctggagcggccctatgccacactgacggccttaacggatcgcgcacaacaactgatgcagcactggggagaggcagagctggcgcgggcgctcagtgcccacccgcggatcggggaaaagccgacgggcggggaagcgcatgccgcgctgtctcgccaggagcaggcggaggttaatgccgacgatgccgctaccgcccgggcgctgaaagaagggaacgcccgttacgaagcccgctttgaccgcgtgtttctgatccgcgccaaagggcgcagcgccgccgagatcctgcaggcgctgacccaacggctgacgaataatgacgcgcaggaaattgaagcggcactggaacaattacgtgaaatcaccttactcagactggcgggagttattagcgaatgatcaccctgagcacccatattcttgatatttctaccggcaagcctgcacaaggcgtggtggttaccctgttatgcgaagggcgcagcctggcgtcaggcgtgacggacagccatggccgcctgggagagctggcgacgggacaactgcgtcccggcaactatcagttggtggccgaactgcaatcgtggtttgcgcgcgatggccgcgagaccctgtaccggcaggcgcagatcgattttatgatcaccgccgaggacaaagaccattttcatctgccgtttttaattgcccccggcggctggtcgacctatcgcggaagttaagttgagtccgccgcccggtcagaataaagcgccgggcagcggttcagccttcgttacaccatacctgttggccattgacccaggtctcactaatgtttcgttcatcgcctaaggtcatcaatacgaacagctgctcatagacatcatgacagcgtgcgccgcgcagcttttgtagcggcgtcaccgccgggtcgataaccaccaaatcggcctcttttcccgactggaaattaccaattttgtcatccaggcgtaacgcgtgcgcgccgcccaacgtcgcatgataaaacgcttcgctggcgcgcaggcgatagctctgtagctgcgccactttataggcctcgccgagggtgcgcagtaggctgaaggtggtcccggcgccaacatcgctgccgatgccgatccggacctgatgttgccagctggcgggcaggcgaaatagcccgctacctaaaaacaggtttgacgtcgggcaaaaggcgattgccgaaccggtctcatgcagacaccgccactctttctccgccagatggatcccgtgggcgaagatgctgcgcgctccggtcaattgatagtgatgataaacatcaagatagtgctcatgctccggccataactgctttacccacgcgacttcattaaggttttcactgagatgggtatgcagccaggtatcaggaaactcctcccgcagccgctgaactgcttgtagtagttccggtgtggaagtgggagcaaaacgcggcgtaatagcgtagcccagacggcctcgcttgtgccagcgctggatcagttcgcgggtctggcgatagctctgttcggcggtttcggttaaatactccggcgtatggcgatccatcatcaccttaccggccagcaggcgcatgttcaggcgcaacgcctcggtaaacagggcctccacggacgccggatgaagcgtacaaaacaccagcgcggtggtggtgccatggctgagcaactggttgacaaaaaaacgggcgatatctgccgcgtaccgttcatcggcaaactggctttccaccgggaaggtataagtggtcagccattccagcagctgttcgccaaaggcgccgatcatttcggtttgaggataatgaatatgggcgtcgacaaaccccggcagcagcagtttaccgcgcagatcgcgatagcctttatgtggatcgagtaatgcttcaccttcctgccatggcagtagcgcctgaatcttcccggcgtaaataaagagcacgccatcatcaatatatcgcgcgtagcgggcgatatcgtcagcgctggcggcgggttggctaatatcaaaaaacgcaccgcgtagcgcggtgtggtattccagcatgttgccgccttatataagtaggttgatagctattgcgcaaatatgtgcaaatttaatgccaggaggccgcggaaggcaccgcggccgggcgggattattctttctgcgccagcgcgccgggggtaaagcgggcggaggaagcggcctgccgctcgtcgcgggcaatccagcgatacaggctgccgcttaacagcacgccgatgaaccagctaaaattggccacctcatgcagagcgggaataaagctgataatcaggccgaccgccaccgagggcagcagcgcggcgatggccttcgggttaaagccgttgcggtaccagtatttgcctttcggggtatcatcgaaaagatcgtcgatcgatacctgtccgcgtttaatcaaatagaaatcaaccagcagaatgccgaacaacggcccgataaacgctcccaatacatccagggtgtagtgaataagttctggggagttaaacagattccacggggtgagcagtatcgagccgacggcggcaatcatcccgccggtgcggaagctgattttttgcggcgcgcagttggaaaaatcaaatgccggcgagacgaagttggcgacaatattgatgccgatagtggcggtgatcatggtcagcaggccaatggccaccgccagatcgttacccacatggctcaccgtttcaatcgggtcggtgatcatccggccaaataaagattgcgtcccggagacgattactacggtcactaccgagaacagcaggaagttaaacggcagcccccagcggttgccgcggcgaatttcgcccatgcttctggcataacgggagaaatcgccaaaattaagcagcggaccggagaagtaggagaccaccagcgcggtggcggtgatcatctgccagctttgctcgccggcggtcagcgtcttactggcgagggtaaaggagataccgtcgaggcctgtcttgtatacaatccagcccgccagcgccagcatcaccacatataccgccgggccggcgatgtcgatgaagcgcttaatcgcgctcatgccgtgccagaacaccatcgcctgcaacagccacatggtggcgaaacagatccagccaagcgatgaaagacccagcaatgacgtttgcgtcattgccgccagcgagggccagaacttcagcagcaccagcattaaggcgttcgcagccagataagtttggatcccgtaccaggcgaaagcaatcagcccgcgtatcaccgctggaatattggcgccgaagacgccgaacgcctgacggcagatgaccgcatagggcacgccggcaatctggctgggtttggccaccagattggcgcaaagctggacgataacaattccggccaacaggcagataagtacctgccagctcgccagacccagcgtaaagaaactcgccgccaccacatagccgcccatgctatgcacgtccgacatccagaaagaaaaaatgttgtaccagttccagttttgctcgcgcgtcggcgccagatcctcgttgcaaagacgcgggctgtagcctgatgccgggtctccggcgttgagctgatgcgtgttttgtgtatttggcatggatcctgctcctctgaagacaaacgttgtgccgttgatagcggaaggcgttgcaggattcaggccagaatggttaatcttgtatacaaaatatttattttatgtatacgatttgatatcaaaatggaaagtggagtagaccaatgggcaatgaaaatccgctgcaggccgcagccggactgcatgacagggatgagtctatctacgaggccttgctgaccgcgattgtcgagcaacaactgctgcctggcagcaaattgccggaagaggcgctggcggaggtgtttggcgtcagccgcacaggagtacgcaaagcgctgcaacgactcgccgctgtgcaaatggtgacattaacgcccaaacgtggtgcacaggtcgccagtccgacggttgacgaggcacgggaaatattccgcacccgtgcgctactggaagtagcgaatctgccggatgtacttcaacgctgccagcctccgcatcttgcggcgctggaagccattattcagcaggagcaactggcgcatgaggcctatgatggcccggccgctatccgccattccgctaattttcatattcagttacaggccatttccggcaaccaggtgctaacggagatggtcacccggctcagccaacgctcatcgctggtgattgccgcctggggcgcgccgtggcggcaagggtgccgctgcgatgaccacgagcgccttgtcggcctgttacgcgaaaaagcgctgaccgcgctgaccgaggcgctaaaccatcactttgaacacatcgtcgccagtttatgtttttcccgcacgggggagtcggttcccgatttcgcccggctattcgccggctataaggagcggtaatgtccaccatctgtatacaagttatcaatcccaataccgatcccggtatgacgcaaaccatcgccgaggcggcccgcgccgcggcgtcgccaggaaccgatattctcgcggtgtgtccaccggacggcgtgccgtcgattgaaggacattttgacgaagccatcgccgccgtcggcgtgctggagcagattaaagccgggcggcggcagggcgtttccggccatgtcatcgcctgttttggcgatccgggactactggccgcccgtgaactggcccaggggccggttattggtattgccgaagcggcgatgcatatggcgacgctggtcgctacccgcttctcggtggtcactaccttgccgcgcacgctgattatcgctcgccacctgctacatcagtatggattccatgaccattgcgccggtctgcatgcgatcgatctaccggtgctggcgctggaagatggcagcggcgtggcgcaggaaaaagtacgcgcccgctgtattcaggcgctaaaggaggacggctgcggcgctatcgtgctgggctgcggcggcatggcgaccctggcgcagcaactgacccgggaacttcaggtacccgttattgatggcgtcagcgcggcggtgaagatggttgaatctctggtgtcgctaggactgacaaccggcaagcacggtgatttagcctatccggaacgtaaaacgcttagcggtaaatttgccgtgtttaatgattaaatgaaggggtgggagatgataccagcagcagaatcgtatccgcgcgatttgcgcggctatgcgggaaagccgccgcacgcgcagtggccaaatcaggcgcgtatcgcggtgcagtttgtgcttaattacgaagagggcgccgagaatcacgtcctgcacggcgatgcgggttctgaacagtttctctccgatatcattggcgctgccagctatcccgaccgccatatgtcgatggactcattgtatgaatatggcagccgcgcgggtttctggcgtatccatcatgcctttcaggagcgggggttaccgctgacggtatttggcgtggcgatggcgttggcgcgtcatccggatatcgtcgcggcgatcaaagcggccaactacgatgtggtcagccacgggtggcgttggatccactatcagcatatggcgattgaacaggagcgtgaccatctgcataaagcggtgcaggtgctgaccgacctgtttggcaaaccgcccaccggctggtataccgggcgcgatagccctaacacccggcaactggtggtggaacatggcgggtttgattacgacagcgactattatggcgatgatttgccgttctggacggaggtgccttgcgccgacgggcaacgtaaaccgcatctcatcgtgccttacacgctcgatgccaacgatatgcgctttgccaccgctcaggggtttaataccgctgaacagttttatacctatctgaaagacagctttgatgtgctgtacgcggaaggcgaaacgtcgccgaaaatgatgtctatcggcatgcactgccggttgctgggccgccctggacgctttcgcgctctgcaacgttttcttgattacgtgcagcagcatgagcgcgtgtggatttgtacccgccagcagattgccgaccactggcggcaggtgcatccgtaccagccatagcggcaggcccattgcgccgttatttgtcgggtggcggctaacgccttacccgacctacgccgacctacggtccgtgccattgtgagttggtagccctgctaagcgcagcgcaagcagggggcgacaacggcatcaatgtcccatcaaactaacctgtgcggcaacgatacgccagccacaggcaaaccgaacccaggtttgttgctgacggccgatacgttcgctgccttcacgggtgaactcggtactgcataccgcataatcctctccataggtggtgatcaccgtatggcgtaactcccgcgcaagccctgcggcggggcgcgcggcgcggaaggcgcggatctcatcaataccataaagattctccccggcgccgaggcgaaccgtgcgcgtatcgtgccagaacaatgcatccagcaccgcgatatcgttactcaccagcgcttgttcatagcgataaaaggccgccattacttcggcgatcacctgcggaagattgatttcttgcgacgcgatcatgcggctacctccaccgggcgggaatcggtcattcccatcgcttccagcgcataggcggcgcgcagacaagcctgttcattaaacggcgcggcaattaactgcaccccgacaggcagccccgtcgcggtacgtagcgggacggtcaccaccggcagaccgataaaggagattggttgagtaagcatgcccatgctggcgcgtatcggtaaagactcgccgttgatctccatcgtctgctcgccaataagcgtggcgctgcacggtgttgccggggcgatgagcacgtcggcatgggtgaatagcgacgcgacttgctgctgagcgtggcgacgaaagcgctgcgcctgcaggtaccaggctgaagggatcatcgctcccgccagcagacgttcgcgcgagtgcggttcaaagcgctccggctcacgccgtaaggctggcaggtactggtttccgccttcagaagcgctaatgataaaagcagaagcgcgcgccagctccgcctcggggaagagaaactcttcagaggcttcgagatagcgggcgacccgagccaccgccgcgcgggcatcgtcatcgcaccagcggctgaaatagccgcctaaaaccgcgcaacgcagcccctggaggccatatcgcagatgcggcgtggcgggggcgacgccgcgttcggcctgaaaaccgtcattaacgtctcgcccctgcagaacatcgtagactgtggctagatcctctaccgttcgggcaaacggaccaatatgatcgaggctgggaacaaaagggtggctgccggtacgcgacagacggccgaaagttggcttgagaccaaaaatcccgctcagggatgccggaacgcggattgaaccattggtgtcgctaccgagcgagaaagtaaccagcccggcggcgaccgccgccgctgagccgccggaggatccgccagcaatgcggttaagatcgtgcggattacgcgtcgcgccatagtggctgttttccgtggtaaaaccgtaagcataggcgtccatattcagcatcccgctgagcaggccgcctgcgctttggatttgacttaccgcccagctatcgacgcgggcaggtgggttattactgaacagttgcgcgccggcgagtgtggtttctcccgcgacatcaaacagatttttgaccgcgtagggaacccctgccagcgcaggtagcggctgattcgtgcgccgtagggcatcaatggcgtccgcttcgtcgagcatccgtttcccggtgacagtcgtccaggcattgagcagtgggttactttgcgcaatatcatcaagcgtctggcgagccagctctctggcgctaaattcaccgcgactcagcgactgctggatcccggcaatggtcatctgatatagcttcatgctttatacactccggcgatttccaggcgctgatcgagcggataggccatcagcggttcagccatatcggcaatgcggcgaaattgcgccagcagctcagcgcggcgcgattcatccagttccagggcaaggatctgttccatctgtagaagccagtcgcgccactctttttcggtttgtttcatgcttctcctcctaataaccagcggcggtgccgttactgcgcgggtcagacgcgccttcaaacaggccgtcaggatggcggacaatggcgccggcatgtcccatggcctcgctgaagtcggccagtacctcaacttcatgccccagttccctgagtcgggagagggtttgcggcgcaaagcggccttccacttttagtgagtccgaggtctgcccccaggtgcgcccaagcagccagcgcggacgagaaatactctcctgaagcgggacgttctgcaggatataacgggtgaacagcgccgcctgcgtttgcggttggccgtcgccgcccattgaaccataaaccatcacccgcccatcgttcaggcgtgcggcggcgggattaagggtatggaagggttgcttgccgggcgccagcgccagcaaatgcgccgggtcgaggctgaacgacgcgccgcggttttgccagacaataccgctgtccggaagtaccacgccgctgccaaactcatggtagagactctggataaaggagaccgccagcccgctactgtccatcacgcccatccagacggtatcgccggggcctttgcctgcgccccatggcgcggcgcgctggtcgtcgatcttctccgccagcggttgtaacgcctgcggggacagcaaactttgaatatccacatccaggtgcagcgggtcggtaatatgtttatctcgcaggctgaaggccagttttgtcgcttccacgatacggtggatggtctgcgcatcgtcggcctgctccatcgccagccggtcagtgatgccgagaatggccagcgataccagcccctgcgtcggcggcgccaggttccataactcaccgtgttgatgctgtaaccgcagtggttgcgggcgacgcgcacgatgctggcgcagatcgtcaagcgtaataggcaggccgtaacgggccatgccagccgccagttgttccgcgagagagccgcgatagaaactatcaagcccttccgcaaccagccgttttagcgtggaggccagcgcaggctgacaaaagcggctgccgctttcaggagggcggccattgaccagaaaggtctcagcgaagcccggctggcgctgaagttcatctaactttccagcggtggcgctggcttgtgacgcggtcaccggaataccgttatcagcatagccaatcgcgtcctgtaacaggcgcgaaagcggtagtgatttaccggtcagggattgtgaaactttcagcgcctcatcccagccgctgacggtgccggcgacggtcagggcggattgcgggccgcgatgcgggatgtgcgttagcccggtataggcttccggcgtcgccagtgaaccggcggcgccgctggcgtcaatggcgatcggatcgccctgcggcggcacgatcagccagaacccatcgccgcctaaaccattcatatgcggatagaccaccgcgatggttgcggcggcggcgaccatcgcttctattgcgcttccgccttcgcgcagcacggacagcgcgctttggctagccagatgatggggggcgaccgccatcccctgggtcgagaaatgactctgcataacttatcctcgtaacgaatcatgcagccactgctgcaaatgctgtccgtgcaaaagctgttccactttgaaaagaaagtttcaatgttgtggttgtctttttcttttctcattgtggcatgcattgtgaagggtgttagcggtatagttcagtgaaacaaaagttacagaggcgctatggaacaactcgatgaacggctgaaggcgcaatatgcgtcgttgtcaccccaggagcagcgggtggcggatttcattgtcgaccactttgatgacctgattagctacaacagcgccgagctggcccaactgagcggggtatcaaaagcgacagtaagccgtctgtttaaacggctgggatatgaaaagtatcgcgatatgcgcgatgagctgcgcacgttacgccagagcgggatgccgttgaccgatcatcgcgaggcggtgcagggtaatacgctgctggcgcggcattataaacaggagatggcaaacctgacgcagtgggtaaacgcgctggatgcccggcagtttgccgaagccattaacgcgctggtcaaggccaggcgcgtcgtcattattggcatgcgaaactcctggccgctggcgctgcatttgcgccagcagttgcttcaggcgcgtgggcaagtggtggtgctgccgcaaccggggcaaagcctaagtgaagagctggtcgatataagcgcggaagatatcgtggtggtgatggcgtttcgccgtcggccgcggattattcgtcccctgatgcagcaactgcaacagcggggagttccgcaactgctaatctgcgagcctcaggcgcatagcctgtttccgctggcgtgctggcggttatgcgccccgctggatagcgtgtcggctttcgacagctacgcgtcggccaatagtcttatcaacctgctggcgaacgccttgctacatgaaattctcgatagcggtcgcccgcgcattcatgacatcgccacgttataccagcagttggatgagcttgaacaacgataatggggagccagtctggtgctttgcacctttttggtgccaaagtgcggtaaggagaagggcgactcttcttaccgccatggttaatattcgcgtcatttctcgctaaaagccgattaggcagcgcaaatttcttttgtccgtatctggcacattagttgcagaagtttatttaaagaatcttttgtttcatactaacgtaacgggtaatgatgatgaaaaaactgctgattgcgctgaccggggccgcttgtctgttgacacaaatcaccgccgcacacgcggaccaactccaggatattgaaaaacgcggcgtgatccgcgtcgccgttccccaggatttcccgccgtttggttctgtcggcaccgatctccagccacaggggtatgacattgatatggcccgctatctggcaaagcagatgaagctaaaactgcagctggttccggtgagcagcgccaaccgggtaccgtatctgcagaccgataaagtggatctggtgatctcaagcctgggtaaaaacgccgagcgggaaaaggtcattgatttcagccaaccctacgcgccgtttttccttggtgtcttcggcccgcagggcgctgccctgaaagacgccgccgaactgagcggtaagagcatcggcgtgacccgcggcgcggtggaagatatggtgctgaccagcattgcgccgaaagcggcgcagattaagcgttacgaagataacaacaccacgctgtcggcctggctttctggccaggtgcaatacgtggcgacgggtaatctggtggtggcggctatctcgcggcaaaacccggcgaaagccccggtcgccaactttatgcttaaggattcaccgtgcgtgattggcctgaaaaaaaatgaaccggcgctgaaggaaaaggtgaacgccttaatcgcgcagggcattaaggacggcaccctcaatacgttatcacagcagtggctgaaagcgccgttgcccagcgactttgccgcttaaggtacagcgatgacggagcaattacatttttccgcgctctggccttattggccggagctcgtggcgggactctgggtcactatccaactcaccgcgctggccacgctcggcggcctggccatcgggattctcggcgcggctctgcgtagcgggcgggcaagctggctaagtcggatatggggggcttacgttgaggttatccgcaatacgccgttcgtggttcaactgttctttattgtcttcggcctgccgaatctggggttgaagatgacggcgggcgaagcggcactgctggcgatgatcgtcaacctgggcgcctacagtacggagatcgtccgcgccggtatccaggtgacgccaaaagggcagtgggaggccggccgggtactggggctcagccggagtcagacctttattcaggtggttttaccgccggcgttgcagcgtatttacccggcgctggtgagccagtgcattatcgtaatgctcggatcgtcggtggtatcgcaggtctcttatgaagagctgacctttgccgccaacttaattcagtcgcgaacgtttttgagcttcgaggtgtatctggtgaccaccggtctctatttagcgttatcgatagcgatgcgccagctgctaatggcggctggacgtagatggctgagggtacaggcatgatgacaacctttaccgactgggacatcgtacgcaacctgctgctggccggacgctggaccgtgctgctatcgctgacggcctttattggcggcgcgctggtgacattaccgctgttgctgctgcgcctgcggggtaaattgtgggtgcagcgcctcattcgcggctatatcgagctatttcaggggacgccattgctgatgcagctgtttcttgcctttttcggcgtggcgttattcgggattgatgtgtcgccatggaccgccgccgcgctggcgctgaccctctataccagcgcctttttgctggatatctggtacggcagtattcgggccttgccgaaaggacagtgggaggcatcgcgttgcctgggattaaatttcagccagacgttatgtcgcgtggtggcgccgcaggcggtgcgtattgccatcgctcccaccgtgggtttcgccgtacaggtaataaagggcaccgcgctggcgtcgattatcggtttcgtcgagctcaccaaggctggcaccatgctcaccaacgtgacgtatcagccgtttaaggttttcgcgctggtcgcgctgggctacttcatcatgtgttatccgctgtcccgttacagccgctatctggagaataaattcaatgccgctcatcaccattaatcaggtgcagaaattctacggcgataatcacgtgctgaagggggtcgatctcgatatcaatatgggcgaggtgatctccatcatcggccgaagcggctcggggaaaagcaccttattgcgctgcattaacgggctggaggggtaccaggaaggcagtattaagctcggtggcatgaccattaccgacagcgattcgcaggcgcggaagattagccgctccgttggcatggtattccagaacttcaatttattcccgcatatgacggcgctggaaaacgtgatgctggcgccgcggcgggtattgaaaaaaaagcccgccgagtgccgcgaactggcgcagcaaatgctggttaaagtcgggcttggcgatcggttggatttctatccctccagcctttccggcggtcaacagcagcgggtagctatcgcccgcgcgctggcgatgtcgccaaaagttttactctgtgacgaaatcacctccgcgctggatccggaactggtgggcgaggtgctcaaagtgctggaacagctggccgcggaaggaatgacgctgattctggttacccatgaaatgaattttgcccgtgaagtcggcgaccgggtggtgtttatgcaccagggtcgagtctgggagcagggcgacagcaaaacgctgttcagccagccgcaaaccaatgaactcaaacaatttatctcctccgtgcgcggactgaattaataaaggaatctacgatggatatcgctcaattttcaccaatcaatcctccgcatcgtctgctgatggggccggggccgatcaacgccgacccgcgcgtcctgcgcgcgatgtccagccagcttatcggccaatacgatccggctatgacgcactatatgaacgaagtcatggcgttataccgcggggtattccgcaccagcaaccgctggaccatgctggtggatggcacgtcacgagcggggattgaagccattctgatctccgcgatccgccccggcgacaaagtgctggtgccggtatttggccgctttggccatctgttatgtgaaattgcccgccgctgccgggcggaagtgcataccattgaggtgccgtggggggaagtgttctctcccgagcagattgaagatgcgatcaaacgggtgcgtccacgtatgctgctgacggtgcagggagacacctcaaccaccatgttgcaaccgctggcggagctgggcgagatctgccgccgttatgatgtgctgttttataccgacgccaccgcctcattgggcggcaatgcgctggagaccgatgcctgggggctggatgcggtatcggcggggatgcaaaagtgcctcggcggcccctccggcacctcgcccattaccctgagtccgcggatggaagagactatccgtcgacgtaaatgcgtcgagcaggggatccgtaccgccgagcaccttgatggcgtcgatgagatggtttactccaactatttcgatctcggtatggtgatggattattgggggccagagcgccttaaccatcatacggaagcgacatccgcgctgttcgccgcccgcgaatgcgcgcgcctgattcttgaagaagggctcgataacggcattgcccgccacaaactgcacggcgacgcgctggtaaaaggtattcaggcgatggggctggaaatctttggcgaccagcaacacaaaatgaataacgtactgggcgtgatcatcccacagggcattaatggcgaccaggtacgccaactgatgctgcaagatttcgctattgaaattggtacctcatttggcccgctgcacggcaaagtgtggcgtataggcacgatgggttacaacgcacgcaaagattgcgtcatgaccaccctcagcgcgctggagtcggtactcaattacctgaaattccccaccacgcagggggcagccatgcaggcggcgtgggatcattatcgcagcgagaaaccgctatgaacctggccgcagcgcgagtgatggcgcgggcagagagattagcggcgataagcgaaacgccggaaggcctgacgcgggtttacctttcgccacagcatctcgaagctaatcagcaggttgcccactggatgcgccaggcaggcatgattgtctggcaggacagcgtcggtaatatttgtgggcgctatgaaggtagagaagaaggggcgccggcgattttgctcggatcgcatctcgatacggtacgcaacgccgggcgatatgatggcatgttgggggtgttagctgccattgaagtggtgcagagcttacataatcaggcgcgccgcctggcgcaggccatcgaaatcgtcggcttctgcgatgaagaaggaacacgctttggtatcacgctattgggcagcaagggtctgacgggaagctggccgcaaacctggctggcccaacgcgatgccgaaggcattagcctggcgcaggcgatggtcaacgccggattggatccatcacgcgtccattcagcctcgcgcccggcggaagattttaccgcctatctcgaactgcatatcgagcaggggccgaggctggaacaggccggttcggcactcggcgtggtcgaggcgatcaacggcgcgcggcgcctcaattgctgttttaccggcgaggcgggtcatgccggcacggtgccgatggaccagcgccgggacgcgcttgccgccgccgcggagtggatgctgtatattgagagcacgacgcgccagcagggaggcaacctggtcgccaccgtcgggacattgcgctgctcgccggcagcggtcaatgtgatccccggcgaagtcgcgttgactctggatatccgcggtccgcaggatcagccgctggatgcattactgggttcattgctggcggcagccgcagagattgccgggcgtcgcggcctgcagtttgccgctgaggagttctaccgcattgcggcaaccgcctgcgatccgcgattacagtcggtgattgccgaagcgctatgcgaggtacagggcacggcgttgacgctgccaagcggcgccggacatgacgcgattgctatcgcggagcgctggccggtggggatgctgtttgtgcgctgcaaagggggaattagtcaccatccggcggaatcggtcagcgaagccgatgtcgaactggcaattgatgccttcagccgggcggtgataaaacttgccgggtaaatcactaacgggcgcatcctcttttcggggatgcgccgcaaacttattccgctcccgctggaaaagctattctccgcagtcggctggcgctaacggccaccgacaacgccgaggccgcggcggcgatccacagcgcaagatgaacggcgctttcgtcttttgccaacagtacgcccatcacggcggctcccagacactgcccgaacgtgcgcatgatggataaaacgcccgaggcatagctcgcctgttcgcgactcacgtttgacagcatttcccggttattcgggctctggaagcagccaaagccaataccgcataccaggctccgcaggcagatatcccacgcggcgggcgtagcgggcagcatcgccagaaggattaaacccgcgacaaaaatcatcagtcccagcgtcgagatgagcggagcggagattgagtccgcccagcggccggcgtgcggtgcgatcagcactatccctaatggccacggagtaaacagcagcgccgagagcaccgggctatagccatactcgttctggaacaggaacggcagggcaataaaagtgatcccctggcttacgaaggcgatcagcgacgtaaaggccgaaagggtaaagcgttcatttttaaacatcgcaggcggcagcagcgggttgtccgtctgccggatgcgccagataaaggcggtgccgcttatcgctgcgagcaacgtccagtacagactatcgatatgctgcgaagcgctctgcatgctattcgccgccatgatcgttgaacccaatagcagcgccgacaatatcgctccgggagtatcgaaagcggcttgcctgtcaactgtcggccgcgggagcgctctcaccgccagcactaaggcgacggtaccggggagcacgtttattgcaaacagccattgccagctcaaagtatgcaggatcgtgccgcccagtaccggcccgatggcggagcttgaagcgataagcagggcgtgtatcccgagaatacgccccagcagtcgcgccggaaaaacggagcgcaatatggcgggcgcgatactgagcgttgccgcaccgccgatcccctgcagcacccgcatgccgatgagcagctcaggcgtcgtcgccagcgcgcaacctgctgatgccagaataaatgccgtcagtccggccagaaacaccgggcggtagccgaagcgcgcagccagcgcggcgaatatcgccagcgtcatcgccgccgccagcagatacccgttggcgaaccagacggcggtactgtctgaggcctgtagttcctgcgccatcgatggcagggcaatgtttaccatggtgccatcaaagacgcccattaaggtggtggtcattaccgcggccataacccgcgctcgcgccgggcctggcagcccgtcgtcaccaggttggctggaaaaaagtgtcatcgtgttgtctcctgcagaggatatctggatgacgaaactataaagttggcttttaccgggcggaaggcgcaccatttacactctatagttgcatgaaacgccttatctgaatgttccaggagttgtggtcatgtcagaccccgattttaatttattgattgcactcgatgtattactgaacgaagccagcgtggcgggcgcggcacgtcgtttgaatctcagtacgtcagccatgagccgcacgctaagccggttacgcgacgtcaccggggatcagatattggttcgcgccgggcgtaacatggtgctgacgccgtgggcggaggcgacccgcgatcgcgcccgtcgcgcggtcttcgaggcgaaggcggtgctgcagccagcggccgaagcgctcaacgtacaaaatctggagcgtcttttcaccatcagggcaaacgatggttttgtggtggcgtttggcccttcgctcattgcgacagtagccgaagccgcgcccaatgtctgtctacgctttgcgcctaagcccgaaaaaacgtcacgctatctacgggaagggctggtcgatctggagattggcgtccagagcaatatggggcctgaaatacgactgcaacggctatttgaagatcggtttgtgggggtggtgcgtaaggggcacccgctggccgccctgagagagataaccgtggcggattatgtcgcctggggtcatgtggttgcctcaccagaaggtacgctgcacggttccgtcgatgatgtgctggccgagctcggcatgaaacgcaaaatcgccagcgtcgtccccggatttccgaccgcgctgtccgtggcgctgcaatcagatcttatcgccatgatccccgctctctatttagtcaatcagcaggtcatggagcaggtacatctttttgagctgccttttaaaagccggcggattaccgtctcgcaaatgtggcacccgcgaatggaacgcgatcccgctcaccgctggctcagagagaaaattttggcgatatgccgcgtggacaagtcgttacaccagaagctgtagaagattattggcattgagtttcttcagggcgttacatttataggtcgagacctgtttttcactcatcttcgtcatatgcgcgacatatcttaccgactgccccttaaccagcctgtcgaggacgttaaattccatctcggtcaggcagcagcgcagggtgcggatccgccttggctctttagataacagccaggcggcatccgccacggagatccggtcatcgatgatatgcaacgttaaggtttcaaaacgcttgcgcagataggtggccagcccccagcttttttcattacacaccagatagcccgttcctcgccagccatgggcttccagggtaagcaaaatatcaaccagcgactgatgcgtgccagtgatagagaaacggcagcgaataaccaacgtcgtgctctctaacagtaagggctgccactgcaccgtgccgctatgcacttccatcataacgttacgacggaggagggcgtagcgcagcccctccgcataaaagcgattattatcaagaacaacgtaactcacagtggcctctttataacgtactgggggtatagataacgcgtaacgtaccggtatagtcacccgcgtttttgctgctggcggcaaaggcgggcgttttcagggtaatgggggccgggatgcataacacgctttcgcggccgcccggcagcacaacctgacgcaaatagcggcgattgttggtaccctcccaggtcaacgttttgccgttagcggcaacttcagttgcgccggtggtcgggttggtcaccagcacctgataatcgagacgatctcttgggtccgtctggctgcctccccgtcgccggatagaaaacgccccttcggcacgcccggtcgcgtcaagcccatcgtcttcaaagcgcagaaatgcccgcgtactggtgctgttattgccatcatagaggcacatatccagcgagttttcgcccttaatttcactgccgccgggtctgcccgggaaattggtgaggttgaggttcaccaccggcgtggagtgcggaaatgccggtaaaaaaatctgctggttgcccgggtcaaccacctcaatacgcaggttagcctgccagttagcgatggtgaggtagcctgggcagccaatattgacgttattaaagtcgccgccgcagttggcggtgccccattcgcgcaaatcctgtctcagcgttgccgtccagatcccggcctgatcgagtttgtttaattcgctacggacgatgtaaaaatcaaaatagggcgcactgttccatgcgggcagattttctgtccctccactcacgtagctagcgaaaacaaaggttttgttattgataaacatacggtgttcgccatagacttttacgtccaccgttttgttggttattgcgtgggtaaaacgcaggtttatcggatagggcgcggccgggttcgccgaaaaccataccggcgcggtcatgcaggcgccataggttgtatcggtacgcgactggcaggtcagggtatttcgtccccatttttgcggatcgctcgtatcataaccgccggactcgtgcagccagatatccaggcgggcaggaggagactggcgatcgaaggcaaacgccacgctggtatttctgccggcaggactagcggcctgagcctcggtaaaacagatgcaggcaagcagtaaaatcaaaagacgcgttatcacatcattttcctgtagagagtgtagagttattcatcgccgttgggctgaccgccggcgtacggccagccagcagcagttgcgcctgctgctgcacggtttccggtaacgcggaataagtcagttcttcgcaggtcaccgtaccgacatagcgcacgacgtctcgcatggtcttcaccttcagcgcgcactggtaaaactgctgttgtttcaccaggtagagcgactggatcaggctgtcgctttccgcactaaagccgccattacctaaatcgctccagccgctgacattgagcggcatgccgccgataaacggcgtatgttgttcatcggtcaactggccaagccaggtataacgcgtggtggtttgcacctctctgtgcagcatttttccaggcaccataaataccgttctgcttcccgacccctgcgtaatttcactgttggcgccgtgggaaatgtccgtcgactcattaatagtcagcgtggtttgctgatagccgggcagggcgaacagcgcacgggcgtttgccgggatatcggcgctaccgctgttatcaagcgaaacggcaatgcgggaatcaggtgacgcttccggcgttgcgacgttgaccgcaatggctgacgccgggcgtccgtccccccagcggccaaaccacaggccagaacgagatagcgccagcgtagagctgtagttgccgctgctgctgaaccggtggcgatgatcctggcgatcccacgaatcgctgacggtcaaacttccgttaccaaatcggccgccctgacgggtataggccgaagtattcagcgagtcgctgttaatcccggatgcgttaagaccatattcgttttcaccgcgcgcatcggtgtaccagttgtgcgcgaggttatagttgagctgatttttttcatgcttctgctgttgccacgtggcccccacggaggtgtagctggaggcatcgccctgacgattatgtgccagcgacaggcttacgctgaggaatccgcctttatccttgccatcgccagaatggtcgttacgcataaacaggtttatgctgctgttgatattcaacccgcgggcgctgaacgcgttgctcagtccggcctgccacgcctgcgaacgggagcgggtcatatacaccgattcccagggcaaaccattgtcgtgccgatcgtcactattcggtaattcacgccgcgaaacatagcgaccttcattgcggttatcggaataaccgaggttggcataccacgagccgaccggaacggagaacattaccgagaggcttcggtagcaaccattcaccgcatcaaatccggtactgctggagtcacagttatcagccgataaggcgttacgatagaagctcagtgaaaagccatcgttatagctgatttgctggatattgccgcgttggccctggctgccataaaggtagctaaagcgtgtgctgagtaccccatcaatggggccggtattgaaaccgcgactccagtcgaccgcgctctccacaaaacgctggttctttttcaccgttgcgccgctggtgatcgccagcgtagaagttacaggcaggcgaatgcccgcttgcgccacggcgctgcgttcgtcgctcatatcgtcgttatcggtttcaccggcctgcataaaccactcgacgcggtcgaatggcgtgatgccggtgcgggtaaacggaacctgctcggtacgggtcaggcggttgttttcataaatcgccagcgtcacggtatagctcccgtccggaaacgaacgggtatccagcgtttgcgccccggcattaagataaaaactggccagcagctgattgcctcggcgcgcatcgatacgcgcgtcatgggaaagcagcacggtaatgggcgttccactggactgctgaacggggttgatccacgctcgcgtcgagccggtacgcagaccgcgaatttttccaagcggtagctggctgaggttgatattgccgccggccgcgctgaagagatcgcgcgtatccatttcacctaactgaacgtaatattcatgccacagatcctgacggaaccaggcattattgaccgtgatctcctgctgctgttgatggcgagagcgctgcccaagccaggtccagtcgaggttaaaatacccattctcagtcatggccagcgcgccgtttccctgcacggtcatcgactgatagtcttcatcggccacgaagttgatattttgctggtggatcagcgcgttctcagtattgcgcgtaggctgataccactgattttccgccgtttgtttcggtagataccgcctgtcgaaaaacaggttaatacgggcgttattctcgtcataaatcagggccacgcttttggtgtcgataaaatcgcaacccgccgcggaaccattgctgctgcaggcgagattgccgttacgcgcaagcggagaggaaagggcggcggtcacagaggcgatcaaggcaggatcatcgttgaactgacgcttaattgccgcgatgagcgtttccggcgccacaaaggttaccgtttcaagcgtgatatcggcttcaaacaggccaagcgacgcgccatacagactgacttctgtccacaggcgctgcgttttcgccagatcttcaaaacccgcaggtacgacgatactggcgctggctaattgaacggaagcaggtaacaaaacgacaaaaagaagagcatttctgtgaaaagccatgaacgagcctcgacgtcatcctgacatcagagggcaggcgccctctgatgtacttccttatacgtattgtggggttacgcgccgccttccgcggtggtcgcctgagtcagcatcagactcaccacgccgctgtactgaccggttttcagaatgccttttgtggtctgagagatggtcagcggcaggaccgcagaaccgttttcaacgctgcccgggaacagctcgctgccggtaaattctgcatcggtagtgttcagggttttatcacccagttttacggtcatcggtaccgtctcggcgccatcttcattggtcagattcgctgcgctaaccagacggactttgacgttgctggtggctgagttcgaccagattttggtattgagacggtagctttccagcccacggcccggcagatattgcatatcgatgctggcaggtaacggcgtattatcggcctgggtcatatccaactgggaatcgacgttggcattaaccgtaatatccttctgaatagccattgcgctgaacgcagtagacatcgcagcaacgatcatcagaggtttaatatacttcttcattgatatctccatatttataaacgagctccattagctctttaaacaaaccacatgtggttttgacagtgatgtcgtgttattgcacgacgggcaagtctgcttcttcagctgttttattaatccagttgaaatagcggaatttatatttctggccgtgattctgagtgagtgactttaattttcgctcagtatccggataaatagttgcatcttctctaatccatcggcatttatcgcttgtatcgcatacgccaatttctttcagcggtactcgcaacgtgccatcattttttaaagttcctgacgcgggatttattcgcagagaaaccaccggcttttccggcgccaaatgaaccaatgctccccagataacgttaacaccgagtttagccgacgccggcgtccccgaagattgtactggcagaatgctatccggctgttttacaccttcaaaataaacgcgccaggtactctctttttctggcggcgtcagagaaacgagccttacgatacgtaaagcgcctgccgctaaagcgaatttttcaggggtaacgaccacgcctccgtctttccacgctgccatctcaacttctttttcctgtggcgtacccggattaagaattttcttttgcctcacccgaatgaactgaatatcatcgcttttagaggccactctgatttgggccgtcccggaactgttgacgttaagttccatcgggtaaacgctcatattggcctgtgtcatttctgcgaaaaatgacatcgacagggcagcgagataaagcgcagtggacttgtttgctctgttttttactttcacattcattctgcctgctctgagttcatgtacgactttaacaccacgacaccgtctgctttcgtatcgcttcaggacagggaaactttaaccggaacagcgggttgtgaaaatttgtattagttaactcaaaaaatacagttctttatcctgcattccaggctttaaagttgtatagttaaaagaaaatgccaaatcctaaggggcttaagaaaattcccactgatgaaaaaataagctaattcagaagggctttcttgcctgctgttacaaggattaaaagcaagcagcaacagatgagagtgaaatatgttttttatatgcaacaattcgttgttatttgatcctgaagctcacacagttagtgttgttggacaacctgaatccgtattaacgctttcggcaccggccgtgcgtctgttacaggaatttattcgtcataaaggaagcgaacttagccgtgaggagttgattacccgcgtatggcaggaatttggttttacgccttcgggaaataatctcaacaaagcgataagtgagttacgcaaaagtttccaggcgttgggagaacatcatgagttgattgtaaccataccgcgatatggttttcggtttgatgcggatgttatttttcaacctgcgcaaaacattgacaccagcgcacccgaaccccagcttcaaaaagctgaaaagaggaagcaaccaccacgtctgaaatggtggctgatattcacggcattattagcgtcggtattcggtattggcataattattcgccaacagcagaatataacaacgccggtaaggctaaagccgattgagcaaaaaattgctaaatgtagcgtctggcttattaacgagcatgggcgaccgctggtgttatcgaaattagccgagctgctggataaaaacggcgtggcgtgccagcgagaggcgtacagtgtctattatttcagcgctcgtttttccctcgtcgcggcggatgaagtgtttatcggcgcatgcccggtcaataaagacagcttgtgtaaaaccattcgctataaaagtggggctgaaaaatgaaaattaaacttatcggcggcctcagcctttttctattaggtggcgcaatggtgttttattattgctctgacggggttggtaaacgggatgtactagcctgcagtaccatatttaattttatacgcaacgaaggtaaggccagtgaagtgcgggttaataccgttgctcagttctattttcaccgcgacggcactggtctgacagcctataaaggggccgcctgggcaaatggccagagcatgatcgtcgacagagacgtcgattttgtctggtcgcggcgggaggatgataaagtggtggtattgagctacaccaaaacctggcgcaggcacaatgacaacacgccggatgcgcaatggggaagcttcgccaatccgaccgcgcgttactatctgaccatctccgaggtttcgccatcggtgtggctgatccaggaccgacattatcccacttatatatgtcggggtgattaacgcataaacgaaggagaataccgtcggtattctccttttacgcttagagaatctgcctacaagggaagggcgagaataagggaaagcgagagcgttagcagaaggatcccgcccggattttaaaacataccgttaccgctggcggtttttggcgggacgttttgggtaacatcccaatgttcaacaattttgtgctgttcgttgaggcggaagatatccacgatagcccgcgtaacgccaggctcacgaccggtcacttcaacgtggagaatcacgttatttccgtcgacaaacgcctgcttaatttcactatgcgagtcgggatatttactcttcagaaaagcgataaactgctcgaagccttccacgccatcttttgccatcgggttatgctgtacatagcgatccccgagatatggcctggcggcggagaagtttttatcgttcaaagctttattataaaaatcaatgacattctttttattcaacagttcgctttcactatagcccgcaaaaacggcgggtgtcagaacgaaaaacaatgaaagggcaacgatagattttttcagcatacatcctcctgcgatggttttgatgtcagttaccagatctgccaggtgactcccaatgaacttaacagccagttgggatggcggttgattgaggtgattctctctgaaccagatagtatcttgaatttgattgcatcgactcgttttgatcaagttacttgttcaattaaggagggatggttcaaatcgtaggtcataggctgatgaggacatcggtatgtgtgattgaatgcatttaacttatgttgagtgagaatcaagctcataagcttaagtcattatatctttttgtttttaatgatgtttttagtaaagggatgagttaacttctataaggcttcatgaacttacaggcaatgcatctcttatgagcactttctggcattcatttaagaaccatttcccagcgtacctctaacccaacatctacatgttgacgggcaaacggatcaaagacagggcgggcatagtgagccaccgccaccgcgccagctgccactccccagagtatcagcatggcccgaatgtaatgcgtggagcaataaacctgcagcctttccgccagattccagctgagatttttatggtcccggttggctttgagtttgcggcgcaggtcagatctgatctgccaggtcacgctgttaaggagctttccaaacatagatatcctgaattccctatatgctaagtgtagaaataataaacattaacccactttttatcgcggataacttcacaattaattacctgagcctgtccgggccccgtggttactgccagaatgctgagatcaacgacacggccagcaccaggcataccgttacgctaggttgtcagcaagacagaaggtggttccccggcgacgtgctttatttgaaagtgatggatgaccgcacttttcatcggtcttggtaggtatcttttctccacccttaaatcaactacgagaaaagtatttatattgtgacgaggaatatgagtgcggagctggctagggcgaccgtcatcttcgagtggcctataatccttcgtcatgtagtcagactgtccttgtgacagaacgtgtactccttaggttaagttatagattttataatcaaaaataataattaagctaaaatacgtttcccacatcacaaattacgggtcagttcttcgatgttgtcggaaagcatatccagcagggatctgacataaatattattatttccctgatgccacattgcgctcagtggtagcccttcaacatgcttcatcggcgagagagcaagatacttaacaccgtcagcattcatatttttataggatgctggcaccagggctacgcccagcccggcggcaacaaaactcaggatggtctgcttctcttcggcatactgcgcaataataggcacgcagccgccatccttgaatatattcatcgtcagatcatggctgtgacgccgggtacgtctttccggcacgataacgggttcattacgaaaatcagcgatactgacttcgtcataactgaccagccggtggtcagcaggtacggcaagcacacaggtctcattcgcgataaaacgggtagtcagcttagcatcagtatgttcaggcggacgcacaaagaccacgtccagccatccggaaatgagccgcgggataagattgtgagatttatcttccgtaatatggatatccgcatcaggaaactgcctgacaaaaagattaagtaattccggcagtaatcctctggccgcgctgtcaatagcaccgatccgcagcgtcctcttttgcggcagcacatttttacggaaccgcaaccgtagcgcatcgaaatcagcaatcacggctttggcctcatttaaaaactctgcgccttcaggcgtcagcgacacattccgggttgatcgattcagtagccttatccccagatcttcttccagcagtttgatgaaacggctgagtgacgcaggcatcatttcgagtttacgggcagcccggccaaagtgaagctcatcacctaacaccacaaagcaacgcagctgatttatatccattttttcaccagaaatcgattatctaaataatttgtataaagcagtgctgatgataaaaccgcacacctctccatactgggtttattacaaaacgataacaaccctacacgacaatggagcatccccaaatgaataatcacctcgaaaaaaaggttatgcgcaaggttaccctgcgcattattccttttatcatgctgctgtatttcatcgctttcctggatcgagtaaacattggttttgccgccctgaccatgaaccaggatctggggttttcgcccaccgttttcgggctgggcgccggcattttcttcctcggctactttctgtttgaagtcccgtctaacttaatcctgcataaagtgggagcccgtaatgatttctgacaattccgctggtgtaacgccattatcaagggcaatgtctatatagtgcttaaggtcgccaggctggtttctggcaattagcatggcgacggtcaccatactacgatccctgggcgagagggcatcgcgtgtccacagatcttcagtaatagcttctcgaccaaagcgcgcaagagccggtgagacagaacgaatatcagcttcagaaatcgctgaaggttcaattttcatcatagttttacctcttgtttcctcagcattagcaaaatcagaaataacaagcgacatggccgctgctgcaattacgcttttcatgtcaatcctcactggtcaacggtgcggatcctgtttgattccgcctttgttacgaagaaataccggttttaccgggatagcgtccttactggtgctcatatgcgccgtttgcctgagatagtcacggaagtgtggcgtttgtcggtgcagttgatacgcttcctcactggcgtaaatctcatagaaataccagcggttcggagtctgtgagtctgtagcggaatacatggctaacacgcctttctctactttgagtgactcagccatttcaggcatgacgatgtttttaaattcggtctgaaattcaggctttacctcgacgatcaccagattattaatggttcgctcattcggtatgatgtgtttgtcccccagaaattggggctccagagtgattttatttttccaatcgataatgtcaggtgcccaggcagcgaatgccttgtatggttcagcatttagatgtttgcggtaagcactctcgttttcatagagttcgaccatgaatgccttatgtggattgtcgctgcggtgcagggcgtacatcgccagcgtacctacttcatgatcaaccgaagcggtaatcgtctgtctggctacgtctgcaaaatctttgtcccgatcgggcctgacgccgagctcaaagatattcatcactaccttatccggcgcgtccagctttgttgcaaagacagggctgcttattagcatgcaaattaaaagcataagagtctttttcacgatgatccttttactgaaatggcagtttaagacgttctataagttggtgttggtaagaaggtaatcgatcgctgctggcgctctcaaagacgaggggaggaagccacgtcatacctgcgtgcagggcgcttgccttcaccggtaaaaacacatccgcgagcgataccccgatcctgccgtccggcccgtaagtagagcttccccccgcagctgtactgactacaagcatctcctttccctgccacaaaccgggtccgacactcccccaggtttcattcaaccaggccttcatcatcggcgtaatattgaaccagtgtgtcgggaagataaaaacgacacgactgtgttcacgcatcatttttcgctccgcgtcgccattaatctgacgtgtgtcataaccatacaaagtctcaaggttgcgaaccgtcacgccttccagactctcagcggcttcctgcagcccttttgtcagaactgagcgttccggataagggtgagagacgataacgagcgttttaatgtcggtcttttcacggctatgagcatgactaacgggcatgaggaagataaaagcaaacaaaaacaatgctgctgctctgcgctgaagtaacaccatcataaacctcctttgtcttaacaggattgtaaaacgctatggtgtaacaggagccagttctggcaatccttctacgatataggttcgcgaattgccggcacggtgtcggataggaatgatcttctggtacgcggccgagctataccagtcctgggcatttttgagactctcaaacttaattacaaccagtctgccctgtgctccaaacccttctttaacatcgggttcacctcctctgacgatgaagcgtccaccaaaaggtctgaaggtggattcaacctgagcgctgtacggtttgatagcgtcaagatcggtcgcctgaaactctgcgatgtaataagcaggcgttgctgccagagctgacgcgagcccggagagggtgaaaagagtggctaccactgttttaaaaatcatccttcctcctcataagctttcatgaaagtgaataagggctaccgcgtccagacctgcctggcgtctttcgtttgcggcgtgttttgcgccatgatccccgtcagaacgtgcggctggtaggtttcttccagaaaccggatttcctccgggtttagttgaagatttacggcgtttaccgcgccatcgacgtgatctttttttgtggcccctacgacaggtgacgtgacttttgtcagcagccaggcgagtgagatttccgtcatggacacctgatgtcgttcagcaagctcggcgacgcgctcgataatgctccgatcctgttcagccgtgctgtcatattttccgcgggcataggcatcctcggaggctcgccgcgtgtggccttctttccgggagagacgaccgctggccagcgcgctatagggggtcatggcgatatcatcttcagcgcacagaccgaagagctctcgttcatcttcacgcataatcaggttgtagtggctttgcatggaaacaaaggccgtcagcccttcgcgttcggcaagggcgttcgctttcgcaagctgccaggcatagcaattggaaataccaatagcgcgcactttgcccgcagtaacggcggcatgaagcgcttcaagcacctcaataactggcgtgttgtaatcccagatgtggtaaatgtagaggtcgatgtagtccatccccagattctgcaggctctggtcgagcgatcgggctattgcctcttttccgccgatcccagcggcaatttgcgcggcggttcgtggcagaaacttggtggccagcaccacgtcctcgcgttttgccatctcccgcagcgcccggccaacgtatcgctcgctggagccgttctgataggcgatagcggtatcgtaaaaattgatacccttttcgagaccgtagcggatgatgtcccggcttgctgtttcgtccagcgtccagcgatgctggcccgttaacgggtcgccaaatcccatacatcccatacagatgcgggagaccagtaagtcacttttaccgagccgggtatactgcatctttattctccctctggattattcacgacggaattgagcagatcgacaagccttgaagcgtgttcccgggcaagcgttttttgctgcgcgattttgtcggcatcccgatcggcatagctgataccgcaggtataaaccggctccagcagctcaagattgcacagttttgctgtggtctcgaacggaattagatactcttcaatggcatggccaaagaaaccgtcagcggtatagagcgcctgtggcgcccctgtagtgaaggagaggagcagctttttaccgcccagtttcgccgttgagccatgcgcgaagccgtggacaaagacctcgtccagccattgtttcattaacccgggcagcccataccaggaaaaaggaaactgccagacaatcacatcggccctgagcaggctttcctgctccgcagcgatattgaatttgccgtccggatagagccagtccagacgacgaatttcagcatcgggaagggcggtcgccacttcatcaaggatcgtggcattggcgacggaatgggtaagctcaggatggcctgaaacaataaggatatttttcatttcaatgagttaaatatatttggtgaatgtttaacccagtatagagtgacaccattattttttttagagcagtaaagactcattcacttttagacaaaaactaataatggtctactgttctcattgtaccggtcatcacgaacccgtgaactacgccgtgatgcctagtaaacgttctgcattgcgaaacgcgatggcctctttttcagccttgttgacgggcagactgtctataaaggtttttacaccgtccagggtctgatagggataatcgacggagaacaggagcctttctgcccccattaactcgtagataaacttgaagtgcggcagtgtcagcatacctgacggggtaacgtaaacgtgctcctggaaggttctcgttagcgtgcgtgacagacccgttgcagccagtggtaggctgtcatcaagacgctggagccagaagggtaacatctccccccagtggccactgattacctgcatgttgggatatttatcaaatgcgcccgataacatcagccgcaacaaatggatccccgcttcgtgatgccagccccagccaaacatagaaagcctggcgttgacctctgcgctgaagcccgtgaagtaggcctgctgtacgcttttaagcggtaatccgggatgaagatagagtggcacattcagtttattaaagcgggaaagcagggagtcatagtcaggatgatcgagaaagcatgaagagggtctgccattcagcagcgctcctttaaatcctagtttttcaactgcgcggacaagctcattttcagcatctttcggctgtgcccagggaagtgtggcaaatgccgcgaagcgatctgggtgatttcttaccgcctcggcaaggcgatcgtttgccgccgtatttaatgttaccgcttcatcctcgggtgccagttgggggaatccgcccacagagagtatctgcagggtaattcccgcctcatccatatccctgaggcggcggcttcccaaatcagcgcctttcgcgtttatcagcgcattcttttctatctgcggccggcttcggtcaggattatgaccatcagcgacggttttcccccagtcgccaaggaaaggtgcctgctcaagcgcaacaggcatacacgctcgccctaactcgctgtcgagataatgttcttcgaggcaaatgattttcatattctcaccattcatacaaagcagtaaaattgatacagattagaatcacccggaacagcccgttcgtgtgtgtcattcatgacagtctgttccggacgggctttacaccatcggtttttcccaggcgcctcgtgtatccactctggtctctgcggcgagttgttccagcaggatgatttcctcatcgcgtaactggatgtctgaagcgcaggcggcgtccagaacgtgatggactttagtcgcaccaacgaggggaagggtacctttcgcaatagcccatgcgatggctatctgtgccacgctggcattcctttcggctcccatttttttcatggcggcggttagtctttctatctgcggcagtactgcgttataactttcggcccggccactcccggcaggcatgggatgatttgaatcataacgaccactgagcgcgccttgctccaggaccatgtaagcaaagaacgtgatgttattttgtcggcaataatcaaggatcccggcctcttcagaagcgcgatagagcaggctgtagtgattttgtactgcactgagggaataaccggaagcgttaaggatttcattggcgcgtctgatttgtgccagattgtggttggaaacacctacgcgttttaccttaccgctttgtaaaagtgggatcagtcctggcgtccatttttcgacgtcgaggggattatggatccagtagatatcaatcgcgtccacgcccaggcgtccgaggctggcctcaagcatatcgctggcaggctgtgcagactgctcgttcgcaatctgcggcgtgaatttggtggataaaatcatatcctcgcgggggaactgacggactaatgttcccagcgctgcctcggaactccccatgccatatactgctgcggtatcccagaggttgagacccttactcatggccgtggtgaacacgtctgccatctgagtatcagaaagatgattgccgaagacggtgtcgccaccggcgaagcctgtgccccaggaccatgtgccgagcgcgactggaggaagagttttcatattcagctcctgaaaaaaggccggaacgttgctgacgtaaaccggccaaagagggtgagtaacgatgaaagacagatgtatgaattaagttggctagcggagggcatttaacagcgccacaccgacaccgtgcgctgaagcgggattctgccccgtgataaggcgtccgtcggtaaccacgttttcagaccagttcggggcttcatgatgaagcgcgccatgctcgcggagtgcagtctcaagcaggtagggaaccacatctgtggtgtgaacttcttcctcttccttgttggtaaaggccgccacgtttttgcctttcaccaggtattcgccgctgctgagctttgcgtcaaccagtgccgcaggcccgtggcagacggctgagacaatcccatcgctttcatacacttcgcggataatacgctgggcatcatggctgtcgcggaaatcccacatggttccatgcccgcccgcaaagaaaacggcgctgtaatcggaaccgttcagctcagataacgcaggcgttgtggccaggcgctgctgaaaatcggtttcgttccagaaccaggcgttgacagagtcactgaggtcaaatccatccaccggcggctgtcccccgcgaatgctggctatcgtcgtttttcgtccggcatcttccagtactttcagcggatgcgtcagctcagccaggaaaaaaccggttggtacaccggatgcgcctttaatcggatgactggaaacgacacacagcacgggtttatctgcaggtttcatatcgggcctcactctttatttttaaattcagcggcaaagagattttcccagttaagaaaggagccaagcggaatgcactcaaagcttaataagccagcttttgccagcgggaattcggccattacgttcatcgcttcatcgacagagtcacattcaagaaaaatagcgacgccaggtctgtcctgacggaagtagatgtcgcggatgaacccggatttatacaatccccaggcgtgtagcgcttcagcgttaaggtgtggagcatatttttccagcgatgctccaggtgcggggatatccagacataaaattcgcatcatagtctcctgaactcaggtcgttgtagaaagagataaaagtataagaggcgaatttcacgaatattagaggagcattgacttaagcatctttagactgtacttaataatcaggcggagattgctttaggaacacattatgaataacgccctgtataaccagatacgcatctttcagagcattgcgcgtgagggcaatatttcggcagccgcaagaaaactggaaattacgcctccctccgtcagcaatgcgcttaagctgctggaagatcatattggccatccgctttttgtgcgtacgacccggcgtattgagctgacggagaccgggcagctgttgctggaacagaccgctgcggcggtggagtcgctggaacattcgcttgaaagcattcgcgaccagaatcaggagccctctggtatcgtgcgaatcacgctctcgcgttttgcctatctgttaattcttaagcctgccatggcgaaattctgtcagcaatatccgggtatacagcttgaaatttcggtttacgacggcaccgtgaatgttatcgaagagcgttttgatcttgggatccgttttggcgatattctcgaaggtggggtggtggcgcggccgttaatgaaaccctttcgtgaagggttatatgcatcatcagcttatattagcgagcatggaatgcccgaggtgccagctgacctcagtcaacacaagctgattggctatcgttttatcactaacaaccgcatccttccgttgattctgaacgatcgcggagagcagttgacggttgagatgcccgggcagttaatcagcaacgatattgacgttatggcagacgggatccgtaacgggctgggaattggacgcctgtttgaacccatctggcagttacagcccgacagggagcactttatccccgtgatggagagttactggaaaacctacccgccagtctatctctattaccccaaaaacgcgggtaaaacgaaaagagtgaaggccctgattgattttctgatatccgctacggggcgataaagacgataacgcatcgtcccgtttggaagcgctatttcacaaccccagcggcctggcctcctgtatgaactcaatcagaaggcgaagcccggtcggcagttgccggcggcttgaataatagatataaaaaccttcctccagcggggaccattccgtaagcaccaggcggagcagtccatccttcacatagggtgcaacaagaggctccggaaaatacatcaggccagccccgcctaatacggccacaagacccgtttcagcctgattgaccgtcacagagccaggcacactgatttggtacgtttcgccgtctcgctcaagttcccagcgataaatccgatcgtcgccgagacgattgcttatacagcgatggtgtaataaatcatcaggatgttcaggcgttccgtagcgttcaagatagtcgggggatgctgcgataacccagcgaatatcggcagataaacgccgggcaaccatgtcttccgggacggtgccaccatagcggataccggcatcgaagcccgcatcagtaacgtcaaccatacggttgctggccacaatatcgatttcaatatcgggatagcgatccataaacgcgggcataactggcgcaagcaaaagattggccgcttcaacggcagcattgatgcggatacgtccggtaggggtattacgataccggttaagcgattcaagcgcgccttctatcttgtcgaaaggctgaaggacagactgaaccagttcttcacctgcagccgtaggggtaacgctcttggtcgtacgattaagcaggcgaaccccgagccgggtttccagtcccttcagagcatgactaagcgctgatgcactgacacctaattcaatcgccgcacggctgaaactgcgatgacgtgcaatagccatgaaataaatgagatcggcgacatcagctctgcttatttgcatacagaatagttttccttgtgcgttaaggcccgaatgcgttgatacggaaatgatatacaccttagaccgaccaggactaatccgttgctgaatttttttcacaagtccatccactcatcgcctctcactgaacacgctgtgcttcgttattcttgaaaattatgcgctctggccgtcggtcagggcggaacattcacttaacggagccgtgtatgaactatacgcatcttggccgcaccggcctgagagtcagccgcctttgtctcggaaccatgaattttggtgacgtcaccgacgagaaaaccagtgcccgcattctggatgaagcgcttgagacgggtataaatttcattgatacagcagatgtgtatggcactgaacaatcacccgatatccagcaaggttcggggctgtctgaagaaattattggtcgctggctccagcagggtggccgccgtgaccgtatcgttctggcgacgaaagcctatcagccaatgggaccgggtccgaacgatcggcgtctttctgcttaccatattcgcaaagcctgtgaggacagtttgcgacggcttaagaccgaccatattgatgtctatcagatgcatcacatcgatcgctgtacgccatgggaggagatctggcaggccatggaactccttgttcagcagggaaaagtcctttatatcggtagcagcaatttcgcgggctgggacattgcgactgcacagtcagttgccacggcccgtcattccctgggcctggttgctgagcaaagtctctacaatctgactgcccgaactattgagctggaggtcattcccgcatgccgtcattttgggctgggactgattccctggagcccacttgccggagggttgcttggcggtgtactgaaaaagatggcaagcgggcgccgtgccaggcccgagttttcccgtcttatcgaacagtatcgtccgcagctggaagcctacgaaggattatgtgaggacctcggtgaaacaccttccgatgtggcgcttgcgtggctcctgcagaatcctgtcgttactgctccacttatcgggccacgtacggtcgaacaactccgggaggcgcttcacgcaacgacaatcacgctatcagacgacaccatgagctgcctcgacgaaatctggcccggacccgggggagaagcgccccaggcttatgcctggtaatgatcaaattaatgaatcctttcttcgctttagggagttccagtttatgagcaagatgatgcatgaccagcattctgcttctgtacccgcttcccgggatcgtcgcaattttctgatcgccggcgccggtctggcgttggccgctaccacccttggcaggagcggagcagtgatggctaaaccggctggtcaggacacgtcgaacgacccttcggatgctgttcccgtccagaaggagaccttaaccacgcgtaaactcggctcgctggaggtttcaagcatggggctggggtgtctgcccatggtggggtattacggcggtggtccgcgcgatcgtaaagccatggtttcgctcatccgggcagccttcgaacaaggcatcacgttctttgatactgccgaggtgtatggcccccatctcagtgaagaatttgtcggggaagcactggcccccgttcgcgatcgtgtggtgattgcgactaagttcggtttcggcgtggaggaggggaagccaacctccctcaacagccatcctgaccatatccgccgcgccgtagagggctcgctaaagcgtctgaaaacggaccacatcgatctgctttatcaacatcgccccgatccgaatgtgccgattgaggatgtggcggaaaccgtgaagacgttgatccaggagggtaaagtgaaacactggggattgtcggaagcgagtgccaggacaatccgccgcgcacatgcggtactccctgtgactgcagtacagagtgagtatgccatgtggtggcgtgaaccggagacacggatatttccaacgctcgaagagctgggtatcggctttgtaccttactgcccgaccgcccggagtttccttgccggagcagtcaatccaagccagcggttcgacagcaccgatcggcggcataacctgccacgcttccagcccgatgcactggccaaaaacatggtactgcttgaattcgcgcagtcgtgggcccgtcgcaaaaacaccactccggttcagttcgcgctggcctgggtgatggcgcagcggccctggattgtccctatcccgggtacgacgcaatatccgcacctaatagaaaacagcggtgcaccgcaagtccggttgacggacagcgagctacgcgaaatcgatgcggcgcttgccgaaatcccattgcagggcggtcgcgccgatccgtttaccgaaagtcagtttgataaaagttaaacggtgatggccacctttatacttactgtcacagggagactgtagataatgtctccctctgtgttattgtcagggataaaccacatgaatggactaaatcataacgcgcttagggcattaacagtcctgtattgctgaaggcggcgtgagtgaaggtggcgtatccggaagtggggggatgatcccgtcgacggggtgcggcagatagtgtgcctcgagttccatgatttcggcatcgctaagtgaaaagtccagcgcgctgatagccgtggaaagatgttctggtttcgtcgcgccgatgatcggtgctgtgatgaccgtttttgatagcaaccaggcaattgcaacatgggctcttggcacatcgtgcttttcagcaatgctggcaacaacatcaataacgggcttatccagcagggctgcgttctcatacatttttaacgcaaaggcatcgttttgcgttcgtcgggacgtgacactccagtctcgcgtgagcctgccccgcgccatcggactccaggggatcacaccaacgccctggtcttcacacaggggcaacatctcgcgctcttcttcccggtaaagcaggttgtattgcggttgcatcgtaataaatcgggtccagccgttacgctctgcagtatgctgcatttttgcaaagcgccaggcttccatagatgatgcgccgatgtaacgtacttttcctgatttaacgaggtcatgcagagcctccatggtctcttcaacaggcgttgagtggtcaaagcggtgaatctgaaagagatccacataatccatacctaagcgcatcaggctgtcgtcaatagactgaaaaatggccttgcgggaaagaaacccggtattgggtgagttgcgccacggaaagaaggtctttgtcgccacaacgatctcatcgcgtctggccatttctctcagcgcttttccagtgatctcttcagaacttccgcccgagtaaatattcgcggtatcaaaaaaattaatgcctgcttcaagcgcctggcgaatgagcggacgtgacgccttctcatccagggaccagggttgaggcaagcgttcaggttcaccatagctcatacaaccgagacaaagacgggagacttgcaaaccgctacgacccagattcacatacttcattctgtgttccttcttttattgccagcaattctgtatgtgacagggtattgcactgacatgaagggaaccagcatgcgccatcgaatggtgttatgagtttttttcacagatgggcgtaatcgtcagtggattttacatacaaggacagcgcccacacactgacatcattaattattgttgggtgaggttttcgggcacgcctgaccaacaggaataacatttttttcacggtgttccccgcgttcataaacgcagattgtaccttcatctgtattgacctgttccttcagcgggagctctggttcctgcgcaaaaatgcgaaaggatgcgaccaaaatcaatgccagagaacacaaaagctggactgcattcatatcttcactcctgaaaaatatttaactcatttccagcaccgactggcgaggcgtaagcttaccaattatcggtggcagttccgtttcgcgaagcggacgaccctcaacgatgcttttaatgcgctgtacgcactggtgcaggaggggttccattggccatgaaatacaggtcagttgcggatataactgcgtggccaacggtgaatcctcaagactgaggagggatacctcctgaggcacggcaatattaaattcgcggaacaggcgcatggcctctgcagcgtaagcatcacgcttaactacgatggaagagaacttgctcagactattaataagcgtcaacagcgcgcgttcgacactctcattggctgttaataccaactggcgattaaacggaaatgagtagttctgcaacacgttgcgataaccttcaaccattcgcttgcttgcgtcatcagtctcgttatcaataaccagcgcgatgttgcgatggcctttacctatcatgtagcggcaggcgctctccgtagcaaaagcgaaatcgtagccctgacttttcgcgtccaccacgggtcggtcgaaagaaatcacgttatcgccactgcccggtacaactggtccgaacactacaacggcggcgcattgccgttgtaaatcatctaccgaagctgcatgttcgacgtcattatccacatactggacgatcagcgttttgttcagcactttcattgcgcgcgcaagcgcgggaagaatacgtgcgccactgctttcctctcgtgaggaaagcaccacaccgatatggcttgatgactgactcgccaggttttgcgcggcgaagcttgggcggtagttgagttcttctacagcccgtaataccgcctcacggctctcttcgcgaacacccctggtccccgtcagcacgcgggaaaccgttgctctggaaacattggctaatcgagatacatcatcaatcgttggcatagcgttttctgcgtggtgagttttcatcatcttaacataaccctcccgaagaatcgtcccgtcgccggtcatgacgcttatgtttcgttcgcgttcagccggggaagccaggctgcgccacgtacgccgctggcgtcgccaaagcgcgccggaacaatgcgcgtatagcaggtttcagaaaagagataagaaataatagcgacaggcagatcatcgtagattctgctgacattcgacaatcctcctcctaacacaatgacctggggatccagaatattgatgactgacgccaggctacgggcaaatgcatcaataaaatgccgccagtgttcgcgcgccttcggatctccctgttctgcggcgttgataatttcctgagaggtcaggtttcccgggaaacgacgggcaaaaccggtaccggaaataaaggattcaatacagttatgcttgccacagtagcagggctgagcggggccatcaatcgctggtgcgtaccccggaagcgggttgtgcccccattcgccggcaatggcgtttgggccttgtaacaaatgccggcgcacggcgatcccaccgccacaccccgtaccgataatcacaccaaatacggtgtcagcctttgcacctgcgccatctaccgcttcagagagagtaaaacaatcagcgtcattggcaatccacactggctgccggatacgttcggcaagatcggctttcagatcgtgaccattaagaaccaggcaattgcaatttttgatgagccccgtttgcgggtcaattgcgccaggcagaccgacccctacggtgaagggttccgggctagccgcgcgggcatcatcaataaggctcaccagatgcagcataaattcagcgtaactttctttctgagtcggctggcgcttacgccagagataatcgccttgagctgaaagcaatacagcttccatttttgtgccaccgatatccagtccaagataatgcatacaatcctctgtcataagagaggccgcggcctctctgctgtcgttatgcctggtgcgggcgtgtgcggtaaatgtgaataagttcggtcaccagctccctggccagaatggaggtcatcaggtggtcctgcgcatgcaccatcaccagcgtcattttggttttcccttcgccttcatcagcttcaatgagctgggtttgaacaaggtgagcttcgcgggcaaaatgagtcgcctctttcattagttgatctgcggcttcaaaatcaccttgctttgcgcagccgagggcttcataacaaaggctgcgcgactgacccgcgttaatgatgatgcccataacttgttcttctaattccatgtttttttcctctatgttctactttcaggcggattgagccgcatcttctgcatgttcaaccgcgttttcatgctcttgttccagaagctgtttttcgtaggccttcaggaaggggaagtacatgacggcagatgtcaccatgcatatcaggcacaggatcacagggctgaagctccagttggctgcccatgatgcgccaatgggtgcaggtgttgtccatggcgtcatcgataccacacggctgactaaatcaagatccagtgcaaaccatgcgaaggtggcattgaccatcgggaccagcacaaacggcaggaaaaacagaggattcataatgatgggcgcaccaaacagaatgggttcgttaatgttaaacacccctggtaccacgcccattcgcccaatagtccgcaaatggatggctttgctgcgcagcaaaaggaaagccagcggcagcgtcgagccaacaccaccaattagcaggtaatggtcccagaaaccctgaacgtaaatatgcgggatagcttcacccgcggcgattgccgcctggtttacggacaggtttgccatccaaaaagggttcataataccggtgacgatcagcgcaccatggataccggcaaaccagagcacctggcacaccagcaccgagaggagcactgcggggagcgtatcggacgcggcaaccagcggtttcaccagcgacataatcgcttcgggaataatcatccccagttgcgcttcaataagcaggttcagcggatgcagcgtgatgacgattgccagtaccgggatgaggatctcaaacgagcgcgctacgccggttgggacctccggcggcaggcggatggtaatattatgtcgcttcaggaaggcgtaaagttccgtggagtaaatagccaccagaatggcggtaaagatcccttgaccggagaagtaggccgttgaaatctgcccgtccttcaatggcgcagcgacaagcaaaaaggccattaaagagagcatcccggcggtaagtgcgtcgagatcgtggtgtttggccagacttgcggcaatcccgacggaaataaagatcgtcataattcccatgctgaagttaaagggcagcatgagagcttcacggtgatcgagcgagaattgcagccatgccctggcgaagccccaggatgtgtcgggcgagaagggggggaagataaataccagcataaaagaacccacaatcatgaacggcagagcggtaatgaagccgtcacgaatggaggtgacatatttttgctggccgacggcgcccgccatcggagtaattttcttttcgataacctgaattagttttgcgtacagagagctcatagggtttcccttctttatttgttatctatcagggagagggcgaaatcgagaacggcgccccctttttgcatgccgtaatccatcatgttgattggctcaacgcggatcccgtatttatcggcttgtttctgtagatcgctttgcatgtacttcacctgtggtccaagcaataccacctggtagtgaccaacctgctcggcaaattcggcaacgccatacgccttgatttccgcttccaggccacgcttgtgcgcttcatcgaccattttttttaccagcaggctggtagacatcccggcagaacaacacaacatgatttttttcataacgtctcctttgaatttatggctggaatatagtcaccacggaacaaaacggaaagcgctttccgtttgcggataaggtaattgtgaccacgatcacttgagagcacctttcactttgtatgaatgtgcgcgatcatccctgctattcaagaactactaaggtcgacttatgaacattcatttgatgaatgttgctgtggatttgatagagcaacgcctcacgccggtggcgaatataatcactaaaaatcaacatattacagcaatgcgagacggcttttctcttgcaatgccttttgtcatcgtgggaagtctgatggtgccaatgctgtttccaccgttcgccatttcaagcacctcacgattcggatctttttatctgctgctgcgtccgatgctgttaccaacctttgagctgacgctcggcctggtggcgttgattgttgcatttggtgcaagtgccagccttgccaagcaatatcaattaccggaacggttatgcgggctcaccggatgtctcgcctttctgctgtttatcggttttcgggataatggcgcgacgaatgtttttctgggagggatggggctttttactgccctcatttcaagcgcatattcgattgaaattataaggtttttttataataaagggtggtgcattcgtttgccggatgaggtgccggtgatgacacggaatggtttccagctgctgatgccgctgctggtgattatgctttccatcagcgtgatgaatgccgtgatgctgcagacgaccggacagatttttccgcaactgattggggaagcattgcgcccactcattgtagcgtcagatactctcacggctgtgcttatctccttgtttctgtgtaatcttttatggttcgtcggtattcacggcgcgctgatcattacggggatcatgaacccgttctggctcacctatctgtttgaaaatcagcgagccctggccgctggagaggctgtgctgccccatatttatttacaggggttctgggatttttatctgttgattggcggtatcggctctacgctgccactggtgtttatggcaatacgaagccgctcaaggcagttgaagagtgtgggaaagattggtcttttgccttctctgttcaacattaatgagccaatattgtttggcttccccgtcatcatgaacccggtttttttactgccctttgtttttgttccgttgataaatgcctgtatagcctggtatttgacgcaaatgggtatcctcgacagggccgttgcaatgctgccatggtcaatgccctcaccgctgggtgctgcatggtcggccaacggtagctggaagaatatgtgcatgtgcctatttgcctttttcaacgcatggatgctttatcgtccattctttaaggttcacgaacgccagctgatgcagctggaaaaataacgctcctcttgctgtttctgcccatttctcgtgggcagaagcttaattagtgatattcatcacaaaaatattctcaaagatctcaaatttgtgattcaatccggcaaacacggaaagcgctttccgttaatggatgtacatttccattttagatccttacatttcccctgcacgtttaaccgtgaaaataaaaattcaaagggaacctatgcaaacgttatttaaatcaatacctctgtccttgattaccctcactgtcatcagcggctatgccagcgcagatgagaaatatgattttgcactccacggctatttgcgctcagggatcctcgccaacagtgacggaaaccgggtggattcagtgggactgatgcccgacgggaaatggcgtctggggaacgaagaagataccaagattgagcttatcccgacagtaacgctgaaatcggatactggcgcagttgctcgtgttcaggccaacctgacgcatcaaacaaaatgtaccgcagactggaactgtaccgacgatgacggtaaagaaacccagttccgcgaaggttttgctgagttatcaaatctcgattttgcgccggatatgactttctgggcgggtaaacgttacagcagctccaatctttccagtcaccagttcgactgggagtatattcagtacaacggaaccgggggcgggtttgataacctggatttaggcttcgcgcgctttgacgccggcgtttatgcgttttcaacaacggatgaagccaaagcctatcccgtggctctgggggatcagggataccctgacgattactcgcttaacctctggtttaaaaaaatcggcggcaccgggctggatgttgagcttattggccaccatatgaaccgcaacgaaaaccatcccacttctgctgaaaaaggttatggcgtgacggcgctgtataacgtcgacagtttttatgggctgacaggtggctattcccgcattgttttccagtacggcaaagggctcgctgccgctgactcgctgggtaaaaacggctggggttgggcaaacctggaagacacccagtcctggcgcgtgattctggatggcatggccagtctgggcgaagtggacgtatcgacctttgcattttatcagaaagataaaaactaccgctggtggaccagcgatgatgacggctggggacgctccatgtgggtggcgggtatccggccgtatcatcagataacgaagaatttcgccatgcaatatgaagtgggttacgaatatctggatgataaaaactacatgggggtaaacggcaaaggaaaggggggcctgaccaaggtgaccattgcgccaacgctcaccttcgattctggattctggagccgtccacagctgcgcttctttgccacgtatgccaaatgggataaaggcgtctcggatgcgatagacagaaattacgactggagcaccggtacccttagcccggggggatactctcgcagcggggataccgatacgctgaattttggtgtacaggctgaagtctggttctgaggagataagagatggctttcccgattcgaaaacttctgctcgtctccttactgtccgcgctgggaagcgcgggggcgctggcggcggaacaatcccattttgaacattttattactcgtgatggtgctgcgttaaaagacggcgatcggctctttcgctttgccgggatccatgccccggagctgcatcgtatagaggatgacgcgagaggaacctgcaaagcggatccgcgcgggtgggggcaatatttcaaatggcctactgctgaagagcaagaaaactggattaaagccctggtgcaaacgggtgctaaagcacagcgcgtgtatgtgctatccgttcagcaggaaaacgacgcggcctgcggacgtgaaacgcatatcctgtcgccggaaacgcctaacggcatgccgcggctgaatgaagcggcaatgaaagtttatgacaacatgattgctgaagcagataagcaggggcttcgcctgattctaccgtttatcgatcactggtggtggtggggtgggagagaacagcttgcctcattttatcatgaaaaacctgaggatttttatcggacggacagtaaaaccttccaggcttatcttgacgtgattcgtcaggttataacccggacgaacaccattacgggacgccactactacgatgaaaaggcgattatggcgtgggaaacgggtaatgagctggaggacactaacgccgattttcttcatcagacatctgcctggatccgtaaatgggcaccccatcagcttgtcgtagatgggacttataaaaaggtgaatgatttcgcgctcagcgatccgaacgtcgacatcatcagcaatcactattacaccaatgccaataacaaccaccccgggcaggttcgtaaagatctggaggcgattggtggcaaaaaagtctatctggttggcgaatttggtctcctcgaccaaaaagaccttaacgctatcatgcagtctattgtgcatactgaggtcaatggcgtgcaggccgcgggcggctttatctggggttttcgcggtcatcggcatgatggcggtttttactggcacaaagagtataccggacactatagctaccatctgcctggcttcccggatgaggggaaagcgaatcaggagatggaggttgtcaacctggtacggactgccgccgcacaaatggctggtctgagcaaggtgccagatttgccggtaccagaagcaccgaggttacgcgagagcgattccccctttgccattaactggatggggtcacccgttggtcgttattacgacgtggaaagagctgtgcagccacagggcccatggacacgcgtcggaaaggacatttccgacggcaaaaatgaatgggatccatcgaaaatgagtcttttccgcgataattatcgcagcctgacgctcggccagacttactactatcgggtaatcgctaagaatgaaagtggtcagtcagcaccttcaaacgtgattcgcctgaaacatatgcagaaaaaccttccaccggttattaccctgcaggacatgctttctaccactgtcgataaaggcgttcaactcaatgctgcctggcaggatgacaatctacctggcccgaaagtcagcgtagcgtggagccatgacggtaagaataacgttcacttctgtaacagcagtaaagaggaaacccgagtctggttctccgcgccgggcgactatgcgttgacctttactgctgatgacgggttgctggaaagcagcaaaacgataaatgtcagcgtgaagcccgctgtgaggcctgtaccggcagattattgcagctttggcagcgggactatggatgttagcaagggaacacttaactccattaaaagtgaaaaagatacgttagccatcggagaagacggtttcctcgggcctttcgcgcatgacggagacagcgtgagctggcaggttagcgctccctgggacggtaaatttaccctacacgtgaaatttaacggcaaatggggaagcaagaaaaactcgttcatcgtgaacgacggaacgccagtcagcattgaatttccgcaaacggatgagaagggcaagaccatagtcgttcctgtttcgctcaaagaggggggtaataccatcagttttggaaagtttaccggcgactggggatatatgttcatcaaatcaattgaagttactgcagagtaattatttggctgcccttttggggcagctttttaacattcaggaggcattatgaatcggtatcaatttccggaaggttttttttggggggctgcagcatcaggcccgcagacagaaggcttcgcgaataagccgcaccgttctatctgggatagctggtatgcagaacaacccaaccgctttttccagcagattggtccgcagaaagtatgtgaaacctacagcaagtataaagaggacgttgcgctaatgaagcaaacgggatttaactcgtttcgtacttccattcagtggtcacggctgattgatgattttgaaaccggtaccccaaacgcagaagctgtccggttttacaacaactacttcgatgagatgatcgccagcggcattgaaccaatgattaatctttatcatttcgacatgccggaaatattgcaaaagcagtatggcggttttgaatcaccccatgtgacggatcttttcgcaaggtttgcccgcactgcatttgagctatttggtcataaggtcaaatactggatcacctttaatgagccgatagtacctgtcgaaggaggctatctttatgatttccattatccttgcaaaaaagatggcaagctggcggcgcaggttgcatttaacattatgctggcgcatgcaaaagcggtgcacctgtaccggaaacttgagctaccgggcgaaataggcgtggtgcttaatctgactccctcgtatacccgaaacaatagcgacgaggataaaaaagcagcgtggtatgccgacctgttctttaatcgcagtttccttgaaccgctggttaagcatgaattcccgaaggagttatgtaaagtcctcgcaacccatgattgcttgccagaaataaaaaaagcggatgtcgatctgataacgagttcgcgggtagatttcctgggggttaactactatgttccacgtcgggttaaagcgcgcgaatgtccctatgaacttgattacttcacgccagagtattacttcgagaactacagcgatcccgaagggcgcttcaatccgtatcgcgataataacgagatttttccgcaggcgatttacgatatagccagcaacatccgcgataattacgacaatatgaagtggtatctggctgaaatcggtatcgccatggatatccagtcagaaggtcctgttctggctgatggggttattgatgacactttccgtatcgaattaatggaagaacacctcgaacagctccatcgcgccatcagcgagggggcgaactgctttggcgtacaccagtggacatttattgataactggtcgtggataaatagctttaaacgccgttacggtttctggcgactggatctggaaagcggggagcgacagataaagcgtaacgctctttggtttgcacagttggctgcctctaatggatttacgcccggagcgtttataaagggcaacaagtaatggtctcgttctatcgcatgatatttaggggaacggacggtggagacaatcatgtttaacggcgtgattttatattagaagaggaaaatagtccgcacggcatagactgagcgggctattagggagtcatccaactcgtgaatcacccataactaaaatcgagtagttgggaaactgtcgcggcagcgagtaatattcgcgctgccggcgctggatattgtcattgttattccgtgaaagaggatcataacggacatcgtcaggacaggaccatagtaagtaagttaacaatcgactacatttaacataatatacattatgcgcaccaatgtgaattgtgtccgataacggcgtttgccgtgtggatttgcctacgctgattccaatctcgtactgacagtcatctatcgttgttcttcctgtttcgagtgacttctagactcatgatatcctcactctgacatgtcgcttttttcccatggctactggccaacggtaatctccagttgtcagattaatcgcggacaacaacttttgctgaccgcgcttaaaaatcgttaccaacaccgctcatcgttcgccatcgctttcgagcggcatgtcatctcgatcagaacaccttaaatcgatattccatgatcacttccgacgacagcgtgtttgtacgtgtataatgaccgtccgtaaggactggcgttttaccttgcgtcttatatgaccatcccggcccgaacatcgcccaaaaggtgaagtttttaaacatggactgcgttggaacccaacggctaaaggcattgatttccccggtgcgcacatgattccctttatagttaaattgcccgatgtttcccgccaggccaacggctaattctggcgttaatcgatattcggtgatgttcgccagcaccagttccccatcccgcatgtaatcatcgccagcgtaggccatagaaataaacgttccccgggaatttttactcatgtggcgtggataaaacccgacttcacctgcttttttagcattggtgtagccaatgcccattttgctattccagcgttcgcctttccaggtcgcgtccagcgcaaaatgccaggcgttattgtcaaaatcccgtttgctcgcaggcattgcgcggtaactttccatcgcgtgggtgccgtagacttgcgttccaatcgttatctgcgaatccgcccgaaactgagtaaacagcaggtgccgttgcaggtagtttttactctcaccataagcatactgtgcatcaaatttctctccccgccagagaacttctccgcttgccaggtggctaatatatttaccggtattggtttgaaattgctttttatctggtgagtttctgtccatggaattttcaagccacgcccctcttatggtaaatgggccgtagcttacagcactgcttacgccggaatatgttgttggagaaagccggtttgacgttgaaataacgccataatttttcagcatctgccatccccagcgcgcgtttaactgagccccagaaagcgtatagttaagcttcacgttacgttggccgaacttggaatacccttcggcgttgctttttttgttacctgtaccattattataaagcacgccgcgggagttgaaatagtcgctggcgcccaactttatcgcactataatacgacacatcgaagccgataatatctgcaaaataaccagactggtattctgctgaaaatccctgcccccaggcgttgtgtacatgtttaggattggcattttcctccttaagatatttccagtaattctttgcagagacagtgagctgtgagtcagtaaaaaaaggatcatcagaaatagcgtctgtagcggcccatacaggcgtaaccagcccgcacgctattaacgcggaagttatgttcttaaacatttttatttcctgagaaaagatccgccatagcttatttatggcggaaaattaaactgtaatattatttgtgatttaatgaattcttgcctgcttcaacgtatttcatggtgccaatttctggcacgctgtatttaccatcgtgatacgtgattttcaccactgcagcattcgataatggcaaatttttggccgggtcatccgtcagatcggaaatcattatctgaatcgccgtgcctgaagaaatggccagaatattgttatcaccctctttttgagcattttctacaatagttgccagcgcagcttgtgtccgcacttttacctgctcatagtcttcagctagctgttttggatcggacttggccagcgcgttctggctttcctttaccgagagcgtgcctgctttcatcgctttaaaaagggctttactgtccgtcattcctagtgcgtgtgcgcctgcattggccatatcgacattataaccgccttcaaaaccaccaaaaaacgcctctcgcaggcctgtcatttctgttaaatgataatccgttacgccagcctgtttaagaatcactgccatggtttcgcgctgccgtcccgcatcactggaataaaaacgatcaaattttatccctttgagtccctcacctaaatattgagcaacctgcaccccatccttcgtcaatggggaatcaatccaaccttgcacgcgatcaaacgaattaagcagcgttttcccatggcgcgcaaaataaatattgatgacctcctgctggtcatttttatcattcgtgttcgccatcagcagtggactggtaatggcagtaactgccattaagacacccagaaataattttttcattttaaataatcctttttcatagccaaaaaaaaacctacgtactcttcagccccctggtattgaggtggagaagaaaacgtaggttttgcctgttgaaacagtaacaatccagctactgtcgaccctatcactaatgtttttgaattgcacctaatctatagcgatgatttatgtaattgtgatcctcctcatatcaaccgtattcccatctggacgttaatatctgcagtacgtattttaaactctcttgggattgttactgtttcaggcaaaacctaaggccgtttctgtactcgttgcaggagcggccttaggtttttttttgcattttagttaccctcatgaataacaggagttacgatgaacaagtcatgtattgccgctgcgctgatctctgcattcgcttttaccacaagcgccgcaccgctaaaaattttgattgtcaacgacgatggttgcgaatccacgggcagtatttcgcttcaggaaaaactcacgcaaaaaggttttgatgtgtggatggttgctccagccaccaatcagagcggcatcggttcagccattaccttcaaaacgggtaaaatctttgatgtaaagaaggctgctgataaacgctactgcttcccgggaacacccgccgatgcggttgattttggcttacggggaatactcattaataatccgccggatctggttatctctggcgtcaacgatggcccgaataccggaatggctcaggtcaattcagggacggtaagtgcggcagccagggctgtacgttatggtttcccggcgattgcggccagcattgggtatatctttaccgaagatgaaatgaagaataaatggccaagtacacataaatattggcctgatgcggtggattatgtggttgatgttgttgaaacgctgaatcataaacaggtttctggaacacctttattgcctaaagggtcgggcttaagcattaactatccgccgctgccaaaatcaaaaattaaaggtgtgcactatgttgaaaatgagatgttccctaccccacagattggttatgatattttgcctgatggacgcgctaaacaaaccatcaatccggaatcgttaaagacagtagagaacgataccgattccggctggcttaataaaggttatatcacctatagcctctttgatggggcaatgaacgccccgcaattccaggcgcaatatgaagaactgttgagtaaataattcgccagactaactcacaaccttgcactatcatcttcacgcctgccagcgtcacacttaatcgctggcaggcgacgttttcatttttatcgccacacaataatattgttaaagcctacatctaagttgtactatgcgtatcagataaaccattaggacgctaatgcacggcgtaatgaaatatattaatgacagcctcaaactgggtaccatcgttgagcaaagaataaaggagcgggatcttaagcagctcgaattaaccggctgtatgctgctggatatccgcatgccggggaaaaccgggctgacgctgctcgatgagtggcgccagctaggtctaaccttgccggttattattatgaccgggcacggtaatattgatttatgtcgtcgcgccttcaaaaatggcgcatttgaatttttaaccaaacccattgatgccgacctgttattcgaagtggtcggcgaagcgatggcgcagcaaaaagcgcatcttgaacgacaacaaatattactgccgctgcaggaaaaactcgccacccttaccgcccgtgagcatgaaatgctccagcagctgcttcagggctactccagtaaagaaatcgcccgtttatgctcgctatcgccgcgtaccgtcgaagcgcatcgcgccaatatttttagcaaacttgaagttaactcgctgcccaaactgttgaagatttacgctgatatcgccagtggttctaagtaaaaatacctggtacgttcagtattcgcggcaatagtctccatgctccttccctcctagtattggcctatcgccactcaacacgacggagcatcaccatgaaacgtatccttcttagcgccatcctgctcggcagcctggtcacgaccgctagcgccgcaactggcgttctcagccagaaaaatttgtcagtggagctcgcggataaaatcgcgcaaagcacgctacaggcctgcgccaaagacggctataacgttgccgtcacgctggtcgaccgttccggtacgccgctattaatgaagagaatggataatgccggcccacacaccgtcgaagccagccgcatgaaagcattcaccgcgctaaccactaaaaacgccaccagcaatgtcatgaaaggttctcagtccaacgccggagccgcgaacctgcgagatatacccgattttctgctattagctggcggagtgccagttaagatgggcaaccaggtcattggcgcggttggcgtcggcggcgcgccgggggggaattttgacgaagcctgcgcgattgccgggttacaatccgttgaaaatgaattgaacgccagttaactgggctcgccagtagtcacgttatcggtcatcgcgggtcgccagaggttatccgcgatatattcatatgttagagagcgctcccccaatcccatactcatgtagtggttaatgatggggtgtgttatcattcgcgcgttttataactcatcgtaacagaggtattgatgctggagaatgtaatcatctgataatcggtatgccctttcgattctggggtagctgattacaccgcgcttaaacatatatgccaacgctttgtattggtacgttttagtgcatgatgattacggattgtaaacagcatgaatggcgtctcgcctccacgtctcccccagtaatctcattccagaacgttcaatcgagccatggccgccaatctacaaccacatggtaatttattatgataaatattgatattgaacgcccccaggatattcccctggttcaacaggccattattgaggcttttggctcagccgaagaggcattgctggtgaataaactgagagaggacgccgcctggatcccgactctttcactggttgcgagagataagcaaggaacaatcgtggggcatgccgtttgcacgcgagccagtgtgggtttacatccggcggttacgttagccccagtgtcggtacatccggcatatcaaggggtgggtattggcagcgccctagtcattgcgattatcgaagccgcacgcgacgctggcgagaaactcatgaccgtactgggacatcctgactattaccctcgctttggttttcaaccagcctctgcttatggagttatctgccaacttaatgacggccccgatgcagccaaaatgatcatgtctctcgataacagtgctattcctggaggaaacatgggattttgtaagccgatgactgaatctattcaggcctggcaaccagaccacgcataataaaaaactggcgacttgatcttcaagcgccagttttctttcagccacagagcattaccgactcacatgctgcatggcgttttgctcaaccgccccgcttatcttcttcgcccggctttcatgaccaaagaaggtcagtatcgcgataatgatcgccaccgtaccggcaacgattgccatggccagcccatagttttgaccatgatgatccgcgatcgtggcctgtaacgtcgcattaaccgaagcgataagattacccagttgatacacaaagcccggcagcaccgcacgggtattagctggaaccagttcattcagataggtcggcactacgccccaggcgccctgaaccataaactgcatcaggaatgccccgattcccagcatcagcgaaccgctagcgaatgcccacagcggtataaccggtagtgccagcagcgaggcggttataatggcctttttacggccaatcttctcggaaagcgaaccgaacagcaccccgccgatgatcgacgcaatattgtaagtgaccgcgataatactgatcgttttcggatcaaagccatgctgcacttttaaaaataccggatacaggtcctgggtaccgtgggaaaagaagttgaacgctgccatcagtaccaccagataacagcacaatttccagtgcgttttcagtaccggcagcagcgccgtgctttcctttctctctcgtgacgccagccataccggtgactcctgcacgcagaaccagataaacggcagcagtaaaataggcgcagcgccgatgacaaacatcccgcgccagccgagtaattcaaatagcagcccataagcgacggcggcaatcagatagccaaacggataaccggcctggaaaattccggacatcagccctcgggaacgatccggaatggtttccattgacagcgacgacgccacgccccaaataccgcccatcgccacgccatatagcactcttaagaccagaaaaatcgttaatgacggcgccgcagcagacagcagctcgaaaatcgaaaagaagatgatattcaacatcaggatcggcttacggccatatttctcggcgagccggccaaaaatgagcgcgccgataggccgtacggcaagcgtcagtagtatcgccagcgtgaccttttccagcccaacatgaaacgtctgggcaatgtcactcagtaagaagacgaggaggaaaaaatcgaaggcatcaagtgtccagcttaagaagctggcaatggcggcattgcgctgtagtgaagtccagcctaacatcgtgttatccctatcctggcacagcggcctggagatgtagcagctagccgaaagaacatgcagggccaactgcatatgtaaatgtaaagtttcttaagttacccatatgttaaatacacccaataatcgtatggctgcaagttaattagcatgctaatttgtttcaaattaagtatatgtctcctgatagaccgtgcagacagaatgtatagcatttgctatacgcctgttctacaatgagctgtataccaattgctatacgggaaaagaagatgaaatcagatatccaactcaacatccgggcgaaggagtcccagcgggcgctgattgatgcggctgccgaaattctgcacaaatcacggaccgactttattcttgagatggcttgccaggcggcagaaaacgtcattctcgaccgccgggtgtttaacttaagcgatgagcaatacgccgaatttatcgacatgctggatgcgccggttgaagctaactccgctctcgataaattgctggcgagaaaaccacaatgggaaaaataagcgcgcctgcaccgctatcttcacaccatcagatcgcggaattttgttgtggagaaacggttctcgatcaatggctgaaacagcgaggattgaaaaaccaggcacagggcgccgcgagaacctttgtggtctgcaaggaagagagccatcaggtggtggggttttattcgttagcaaccggcagcgttaatcactcggaagccactggcggcctgcggcgcaatatgcccgatcctatcccggtcatcattctcgcccgcctggcgatcgactgcgcgtttcacggacaggggctgggagctgatttactccatgatgcgctgttacgcagttatcgcgttgccgaaaatgttggcgtacgtgccctgatggtccatgccctgaccgatagcgcgaaacgattctatttacaccacggattcaaagcctcaaccacccaggaacgcactcttttcctcgcgttgcctaaataactccacctttcgtcattttctctaccacacttatctttcagttcgggaaccacaccaaaggaaggataacgatgaagaaagtggcgattgtcggcgttgggccgaccggtatctatacttttcattccctggttgaacggggtgagccgctggagatagtgctctatgagcagggtgaagaggctggcgtcggcatgccttataacgatgagcataactcagcgcaaatgctggcgaatatcgccagtatcgaaatcccccccatctacattacctatctgacgtggctacaaagtcagagcgaaaactggctcacccggtatggcattgagcgtgaggccttacatgagcggcaatttttaccgcgcgtgatcctcggcgactattatcgcgatcggttcctggcgctgttggagaaagccaggttagcgggtttcaacgttagcgtgcgcgaatcctgcgaggttaccgatctccaggcggaacaggatggcgtcaaactgtggattaatcacgcgcccacagcggaacgcgcggattttgccgttatcgccaccggtcatctctggccgcaggacgatgattcttcccgcgaatattatcccagcccctggagcggtttgatgcaggcgcagatagccccctgccgggtcggtatcatggggacttcactcagcggcattgatgctgccgtcgcggtcgtcattcagcatggccattttacgactgacgccgatgagagcgtccattttcggcttaatgacgcgagtcataaactccatatcaccctgatgtcacgaaacggcatcctgcccgaggccgatttctactgtcctatcccctatgaaccgctggaaattgtcacccatcagaggctggaaacggccatcgctgagggtagtgagggattgctggatcgcgtattccaacttatcgtcagggagctggaactcgccgcgccgcactggtgtaagcagataggcttacgccagctcaccgcggatacgttcagcgacgcctggtttatcgacagaaaacgacacgatccctttgcctgggcgcaagccaatttgcaggaagtggaacgcaacaaacagcaacagcataccgtgccgtggcggtataccattctgcgattgcatgaagtgattgagatgattacgccgcatcttaacgaacgcgaccgcgaacgctttaaaacagggctcgcccgggtatttatcgataattacgcggccattccatcggaatcgattcgccgcctgctggcgctgcgtgaggccggggtgattagtattttgccgctcggggccgattatcaactggaagttcaaccacaacggacggtcattcaccatcacaaccaacgcagcgaatttgacgtctttattgacgccagaggccaaaaggcgctgaagagtaaagacatccctttcccgacgctgcgccagcaacttctcgcctgcggtgatgagatcccggatatcggtgatgattacaccctgcaggcgccggcgtgcgctcgcggccgcattgccttcggcgcgctgccgtggttgatgcatgaccgccctttcgttcagggcctcgtcgccagcgcggaaatcggcgccgcgatggcgagatcggtttcacagcaggccagcggccgccggcgcaagctgtggttcagtcatgaagagtggtgatccatcagcatgcgaataacgactaaccgcgtcttaagcgcaacaacggaaaagagaccgccatccaggcatgttacaactacaggttatcaggtagcacaacgcttacgaggtacatatgagtcaactatttagccctgcgcgaattggtaaactggcgctggaaaaccggattgtcatcgccccgatgtgtcagtactccgccgaaaacggcaaggcaaccgcctggcaccgcattcatcttggacagctggctttttccggcgccggtttggtgattattgaagccagcgccgttgagcccgcgggtcgcatctccccggcggacgtcggcctgtgggatgatgaaaccgaagccgccctgtaccgggtactggaagatgttcgcgcctattcaacaacccgcatcggtatccagctggggcatgccgggcgcaaagcctccgtcgctgccccctggcttggcggcggtcagttggcgctggataacggcggctggcaaaccgtcgctccatccgcgctggcatttcatgacggcgaccgggcgccgaaagcgctgagccatgacgatctggcgcggcttaaacaagcctttgttgatagcgcgcggcgcgccgaacgcctaggaattgaactgatagagctgcatgccgcgcacggctatctgttgcaccaattcctctcgccgctgagcaaccagcgaacagatgaatacggcggttcgctggaaaaccgcttacgtttcccgctggaggttttccaggcaatacgggaggcggtcagcgaaaatatcgccgtcggcgttcggctttcggcgacagactgggtagaaggcggttgggatacggcgcaatccatcgtctttagccagcagcttgaagcgctgggttgcgactatattcacgtctccagcggcgggttgtcgccgcagcaggcgattcaggtcggtcctggctatcagttaccgtttgcccatgaaatccgccagcagatcaacgttccggtcattggcgtagggttaattaccgaaccgcagcaggctgaagatgcactgcaaaacggcgacgccgatctgattgccatcgcccgcgctgcgctctacaacccacactggccgtggcaggctgcggcggctctgggggcccaggttagcgtaccgccgcaatacctgcgttcagaaccgcatgggctgaaaggcacgctaaaatctaatcgctgaagcttcacgctatgaacgatagcggcgcgaatgcgccgctaaattattgacagtaattaatcgcgggtttgtacccagaaggcgtgaataaggccaggaatatagcccagcaaggtcagaattatattcagaatgaatgcccagccgaagcccttacccagcagtacgcccagcggcggcaggatgatagtaaatacgattctccagaaacccatacactctccatacaaacaaaattaacgacttaaaaaagagacttcgtctctaagcatagtaattctacctgatgccgccacgttaaccgccccctttacccgattttacgcatcttgtaatgagcattacgtcagcgtgtgcaattcatccgatgtatggttttgtgagttcgatcatgtccccctctccgcattgtcgttatccttaatccaacttgtatggtagtagactataaacaacgcggtaaggaaaagttttcatgcaaatgacgatgcgctggtttgggccagacgaagataaagtcactcttgagcaaatccgtcaggttccgggggtggaaggtgtggtcggcgcgctgtacgacgttccggttggcgaagtctggccacgggagaaaattaaggcgttagtcgagcaggcccacgctaacggtctgacgatggatgttatcgaaagcgtgaatattcacgacgcgattaaaatcgggctgccggagcgcgatcgctatatcgccaactatcagcaaactatccgtaacctcgccgcctttggcgttaaggtcatctgctacaactttatgccggtttttgactggatgaaaaccgacatgaactaccgactggcggatgggtcgctgacgatggcttttgaaaaagccggcatcgataaaacgctggaacaggtcgtctcggaagtgctcagcaacgccaacggctatgccctgccgggctgggagccagaacgtttagcgcaggtacagacgctattcgacagctataaagcggtcgatgatgacaaactgcgagaaaatctgctctatttcctggagaaaattatcccggtctgcgaagaggtcggcgtgaaaatggccattcatcctgacgatccgccgtattctatttttggtctgccgcgaattattaaaaaccgcgacgacctcgactggctgtgtcgcgcggtggattcaccggcaaacggtattaccttatgtaccggctctattgccgaggagccgcaaaataacgtttatcaaatcctcgcggaattcagccagcgcgggcgcattcatttcgctcatgtcagaaatattaaaatcataaaagacaaagatttctacgaatcggcgcaccctacccgctatggctcgctcgatatgtaccgggtgatgcaggcgctgcacgacaacggcttcgacggctatattcgtcccgatcatggccgttttatctggggagaaaccggccgtccgggatacggcttatacgatcgcgcgctcggcgccacttacctgctgggattatgggaagcgctggaaaaccagcacgcctgatccgcacgtcacccaggtgccggaattctccggcactgaaaataataaaatctctgttgggaggatgccatgtctccagccctggctctgctatgggtggtggtcggtattgcgctactggtcatcatgaatctgaaatacaaagttcacaatattttcgccttattaattgccggcctgttcgtcgccgttatggaaggtgtgcccctcgataaaatcgtctcgatggttcagcaaggactgggcggaataatgggacacctggcgctgatcattatattcggcgctatcatcggcaaattcatgactgaatccggcgccagccagcagattgccgatacggtcatcaggcgttgcggcacccgttatctggcggtcggcttgatgtttatcggcgtcatcttcggcattgccatgttttatgaagtggcgtttttgattgctatgccgctggttcttaacatcgccagcaaagccaatatcccgtggatgaaactggttattccgacggtcgtcggcgccaccatgggacatagtttatttccgccacaaccggggccggttgcattagtcagcgccttccaggcggatattgctcaggtttatctgtacggcattatcgtgatcatcccggcgctgttctgtgcggggatcctgttacccgcctggcttccgggtatccgcgagatgaagctgaatgccatgattaaaccgcaggaggagaaacctgccgacgcgctgccgtcgtttgcggtcagcattgccattccgctgatccccgcgatattaatgattgcgtcttcgctgattcagtcgctgtttggcgcggcctcttctgcggcaaaattcttccagttcctcggtagcgcggaaattagcatgctgttggctaccggagccgcaatctggctgctcggctgccgccgcggtatgaacgccgttcaggttaaccactgcgtcacggactcggtcgccagaattgccaacgtcctgttcgtcatcagcgccggcggcattcttaaacaggttattatcgattctggcgtcggcgaccatatcgtcacgatgatgagccacgtcccgctgtcgccgtttattatcgcctggctgattaccgctattattcgtattcttaccggccagggcgccgttgcggcaattacttcagcagggattgtttcgccgatggttaccgcatttcatcttaatccagcgctgatgtgcctggcggtggcctgtggtagcaataccattactttgatgtatgacggcggctttttactctttaaggaaacgtttggtatctcgatgcgtgatacctttaagacctggggcttactggagctcatcaactcggtggtgggtctgttgatggtgttattactgagtctgtttatttcctgagaaacgcaccgcggcggcgacaataccgccgcggtaagcattcaaatatttactgttggccggccggcgcctgctgcgctggcgcttgctccggcgcgatactctcttttatctctttggtcttattggcggcatcggcggaaagttggttggcttcaacgatggcgttatctttaatttttcccgcctctttcatgatcgcatcgcttttttgctgcgcatcctgttttaccgcatccgctttatttttcgcatcctgggcaatcgcgtcggccttcttgtcggcttcagattttatactgctggcctgagttttcaggctatccgcttcattattggcctgcgttttgatgtcgtcgatctgcttatccgcttcttgcttaatggcccgcgctttatcggcggccgcatctttaatttgttccgcgttatctttggcctgatccagtttattgtcgactttcgatgagtcatcgcagccaaacaacgccaggcacaatgcagaggtaatcagcgttttattccacagtttcatcagtattcccttatcggtccaggtggtaatccagtgacggtcatagccttgccgtatcggcagagtcaatttatttataatcgctatgcctggagagtcaagctatcgataattttcagtaatgctttgccggaaaatgcatagaccagccaacaccagcggctaatttgcttaaaaacaaggcaaaaaaccgctattccagcaatcgatacgcccgggcggataacctgctttccttctggatggctaaaaagcatcttatattccattttgcgctaaacggcagatttatgttctttaaaatgccgtttttacagttctaccattcagctatctcgatacgaatgggtaaatggttatgtcactctttcactctgtaagcgacctgattggtcataccccgctgttacagctgcataaactggataccggcccgtgcagcctgttcctgaaactggaaaaccaaaaccccggcggttcgataaaggatcgcgtggcgttgtcgatgattaatgaagccgagcgccagggaaaactgcgccctggcggcaccatcattgaagccaccgccggtaataccgggttggggctggcgctgattgccgcgcagaaaggctacaaactgctcctggtggtgccggacaaaatgagccgcgagaaaattttccatctgcgtgcgctgggcgccaccgtgcagttaacccgctcggacgtcaacaaaggtcatcccgcctattatcaggactacgcccgccgtctggcggatgaaacgccgggcgcgttttatattgaccagttcaataatgaagccaacccgttggctcatgccaccactaccgcgccggagctgtttgagcaactcgatggcgacattgacgccgtggtggttggtgtcggctcaggcggtaccctgggcggtttgcaggcatggtttgcgcaacactcgccgaaaaccgaatttattcttgccgatcctgcgggctcgattctggcggatcaggtagagaccgggcaatacggcgaaaccggctcctggctggtggaggggatcggcgaagattttattcccccgctcgcccatctggagaaggtacgcaaagcgtggcgcgtgaccgatcgtgaagcgttcgccaccgcccggcaactgctgcaggtggaaggtatcctcgccggatcgtcaacgggcaccctgctgacagcagccctgcgctattgccgggcgcagtccaccgctaaacgggtggtgaccttcgcctgcgatagcggtaacaagtacctgtcgaaaatgttcaacgatgactggatgcgccagcaaggtctgctaagccgtccgacgcgcggcgatcttagcgattttattgccctgcgtcatgacgaaggcgcaaccgtcaccgccgcgcccgatgatacgctggctgccgtccttgctcgtatgcgcctgtacgatttctcccagctgccggtgctggaaaacggtcacgtggtaggcatcgtcgatgaatgggatctgataagccacgtccagggcgacagccagcgtttcgcgctgccggtcagagaggcgatgacccgccatgtcgaaaccctggataagcacgccccggaaagcgcgcttaaagatatcttcgaccgtggacacgtcgtggtcgtcaccgataacgatcggtttatcggcctgattacccgtagcgacgtcctgaccacctggcgtaaccgactggaacaataaggaacgaacatgaaaaacctacagacgctcagcgtccatagcggcatttttaacgaccagcatggcgcggtgatgccgccgatttatgccacctccacctttgcccagcccgcgccgggccagcataccggctacgaatattcacgtagcggtaatccgacccgccacgcgctggagacggccatcgctgagctggaaagcggtagccggggttttgctttcgcttcaggcctcgcggccatttccacggtactggagctgctggataaggacagccacctggtagcggtagatgatgtttatggcggcacataccgactgattgaaaatgttcgccgtcgtagcgccggtctgcaggtgacctgggtcaaacctgacgatctgccaggcatcgaagccgcaatccgccctgatacgcggatgatttgggtggaaacgccgaccaatccgttattaaagctggcggaccttaccgccatcgccgcgattgcccgtcgacataacattatcagcgtcaccgataataccttcgcctcaccgatcatccatcgccctatcgaactgggctttgatatcgtggtgcattcggcgaccaaatatctcaacggccactcggacgtggttgctggtctggcggtggttggcgacaaccccgcgctggcggagaagctgggctatctgcaaaacgccgtcggcggcgtacttgacccattcagcagcttcctgaccctgcgcggcatccgcaccctggctctacgggtggaacgtcatagcagcaacgctctgctgctggcggaatggctggagcagcagcctcaggtcgagaaagtgtggttcccctggctcgccagtcatccccatcacaatctggcccgccgacagatggccctgccaggcggtatgatttccgttgtggtcaaaggagatgatgactacgccgggcgcatcatcaaaaaactacggttatttaccctggctgaaagcctggggggtgtggaaagcctggtgagccagccattcagcatgacgcacgcctccattccgctggaacagcggctggcgaatggcataacgccgcagttgattcgactctcggtaggtattgaagatccgcaggacctgatcgctgactggcgaaacgcgctacgtgagtaaacgctaaccccgcgcgcggcgcggggtttcattaccctcagcagaaacataccgctttggcgttttccgtcggatgatagggatcgcttcggtgatcatcgctatcatcccgtttccgcgggatctcaccgtgtttacccggctcttctcgcgccgggtgtttaccgcgtttatcgagttcatggtgatgcgctctgctcatactcaggctctccggttaattgggcgcttgtttgcgcagcttatcaacccgcaccagcggcggcgtcattttactatccaggcttccgttgatgctcaccagtttgtctggcttgatgtcctgaccatcaaaaacggctgccggaataatggccgcaatggtgccagttttatcacggaacagataacggtcgtcgccttcatgcttaatcacattgccgcgcagggaaatagtcgcgccgtcgtgcatggttttcgcctgctcaatggtcataatccggccatcctccataccgcgatagccgtcgtccagctggtgcggcggcggcggtgcggcatcgtttttaaaaccgcccttctcttcagcccagacgccagcggtgagtaacaaacagagtgtcgcgattagctttttcctcattatttcacctttcatgtcagcatgactgttattaaagtctggccgcggatagcgattttaacaacgtcaataattctgatatcagctaaaataacaacgtcgctatcgtatcgttaaatattaacatcatgctggagccgaaagatggacaataatcaacaggatccgccagagataaacgagaatctacaggcgttacgcttcgagtataacttccggcgctatggggtggtttttctcgccattattatcattgctgcattatgcggtttattttcatctggcttcctgagctccgcccatcatgagaattccgcttcatcgttaacggtagactatgaccgttttgccaggctaatgagcgaaaccgaagtcaatgttcaggtaaaaaacagtggcctcgcacatacctcagtggatttttcacccacgttattaagccattaccaaattggtgatattcgaccgcagcccgataaaatgtacagcgctaacggtcatctgatcctggtttacaatgaaaataacagtggcgcgccgctttcgctgtggttatctatcacgccaaaaacatttggcaaactttccacgacactacaggcgaaccggcaacctgccgtcacctttagccaatttgtctttccttaggagtcacaacgatggaaatggtgctcagagccgtcgcaatctatcttatcttattgattatatttaaagttgctggcagaagaacgcttatgcaactcaccagttttgatctgattttactgttgattatcagtgaggccacccagcaggccatgctcagcaccgactattctgttaccggttcaatgctgactattgtcacgctggtcagcgtggatattttatttggctatataaagaagcgcttttcgcaggctgagaattatcttgatggttcgccgacgatcgtcgtagaaaatggcgttgtcgctgacgataaaatgaaaatggtcaatatctctgtggatgacatattgctcgccgcgcgacagcaccatggtatatatcaacttgagaagattaaatttgcgatcctcgaacgtaatggacagatttcaattattccgaccgaagcgtagagacgttacttatcgcgttccggttgtttatcacctgactcaggagcccgtgtcgggtcgtcctcttctttttcagtaacataattaatatacataccacctccaactttgcggcattgaattataaattgtagcgttatcatgaaatttggccattgccataataaataatgtcgtttgttagccataataagtactctcggatatttccggccaccggccagcaatgaatcaataatactcaagtactcagtgaccaatacaccatggcgaaatgccatgttcagaccaattgaggcgactatggcggtaatggttatcaccggcggcagcgcgggcgccggtaaagcgacggcgctacgttttgctaaggcaggctatgatgtggcgattattgcgcgggatgaaagtgggctacaggaggccgaaaacgcatgtcgacagtacggcgtccggacgcaggttatcagcgctgacgtcgctgatgctcgctcgctgcagaaggccgcggcggaaatcgaaacccagctcggcgccattgaagtgtggatcaataatgccatgaccacggtgttagcgcccttccatttgatgagtgatgaggaatttcgccgcgtgacggaggtgacctatttaggttatgtcaacggtacacgcgccgcgctggaagtgatgagccccagaaaccgcgggataataatccaggtgggctccgcgcttgcctggcgttccatccctttgcaatcggcgtattgcggcgcgaaggcggcgattcgcggatttaccgatgctgtgcgaaccgacctgatgcatcaacgcagccggatccaattaaccatggtccaactgccgggaatgaatacgacgcagtttggttgggcaagaaataaaatggataaagagatgcagcccgttcccccggtttatcagccggaggtggcggcagaggcgatttttagcgtcgttcagcgccccgttcgcgaattgtgggtgggtaaaagcaccattcaatccatcgttggccaatttttcttcccttcactacttgaccgcctgatggttaacaaagcctgggaaggtcagctgacagcacaagcgaaatgcagcgaaaagccagacgatctctattctgccgtgcggggcgagcatagcacccgcgggacatttagcgctggcgctcgccagcgctcatttaacgtcagcgccgatttgcctggtaaagtcgcctccggcgttgggatcgcatttggactgatgatattacgcggactactacgccgcccgcgcaagcgccgttaatcgtgctggcggctaaaccagcgataaccataatcggcaagctgtaaccggcagaccttgccgccggtaaggctatcgcgataacggcggtcctccagcacgcaggaccagtaacctgtctcctgacgcggcaatcgtacctctaccgggcgttcgctgaagttcgccagcatcatcagatcgcgagattgactgcggtagcgcagcgctaacaccgatggcggcacgccggataccagctcaaagggggtggcccccggctcatggtattcggcgcgcagttgaaccatctgccgcactcgctgcagcaacgagtggcgttgacgcaacgccagttcgacgttgacctgctgatatcgccaggggccgctggcaaccggcctgacgagtaatttttccgccgcggcggtggaaaagcccccattcaccccggctgaccactgcatgggcgtcctcacggcataacgctctttcagcgacagatcctcgcccataccgatttcatcgccatagcgcatcacaggcacgccaggcagcgacagtaacaccgcatggctaagcgccagccgacggatattgccctccagcatcggcgccaggcggcggcgaatgccacgttgatagactgacatcgacttcttgggggcgaaacagcgcagcacaaactgccggtctgcgtcctcaataccctccaggtcgagctcatcgtgattacgtagccagttagcaaaacagcaaccgggcggcggcttaatcatcgcttgcagcgcgctaacgagcggcttcgcactctgccgggcgaggctgacgtaaaaaaatttgttcagccagaaattaagcaccagttgcaggcgatcgctgtggccgaaatagtgacggtaatcgttcactgccacgtcaacttcaccgagcagaatggcttcaggattggtctgttcaaccagttgccgaagatgggccaatatccagtacccctgctcttcgtcgccatttccggcttgtttaaccaggtgtgaggcggcgtctagccgaaaaccgctcaccccaacgcgtagccaaaaacgcacaatattgtcaatttcgtctatcaccggagggtgcaccagattgagatccggctcgtggcgatagaacatgtgacgataatactgtcccgcctgttgatcccagcgccagacgctcttttcgacaccgggaaacattggcgggtcgtcctgttcgggcggcgaatcggcccagagataatatggccggaaaggagaatgcctgtttttacgcgcctccagaaaccaggggtgttgcgaagaggtatgctggataaccaactcaatgataacgcgtatccccagttcccgcgcgtcatcaatcagttgaataacgtcacggatttgcccaaaatgcggatcgggctgcagatgatcctgcacgtcgtaaccgtcatcgagaaatggcgtcagataaaagggggttaaccacaataccgtcaccccaaagctacgtaagtaatagagtttttgccttattccggccagatcgccacagccatcaccattggcatcataaaacagcgaggtatcaacctgataaattacagcgttttgaaaccacggttgctctgccatcttcgtcccctcgttttagacatgcagccccgccagcgtcataaaaccgcgcaccagcgtactgatgattaacaccaccagaacgccgcagcaccagatcaacagcagccagcccagccttttggcgatacgcttgcacattagtgatagccctcatctgcccgcaccttgccgcgaaagacccagtaactccaggcggtataggccaggataaccggaacaatcagcagcgtgccgaccaacatgaacaactggctggccactggcgccgctgcctgccagagcgtcacattcggtgggatgatccagggccagatacttatccctaaaccgctaaaaccaaggaacagcaacccaagcgtaagaataaaaggcgcggcgtggctgtcggcgtgttgactcagccgccataaccagaggctgagggtaaggaccagtagcggcaccggtagaaaatagaagacattggggagcgaaaaccagcgctcagcaattcgtgcgagggtaagcggcgtccataaactaatgacagccatggcaattagaaaaagcagcagcagtgtgcgtgttaaccgacgcatcaagcgtaacaacgccccgtcactttttaaaataagccaggtcgcccccagtaaggcataagtggcaattaacgctaatccacagaacaaattaaatggcgtcaaccagtcaagcggcgaaccagcgaattgccgcccatgcaacggaaaaccatgcagaatggcgccgacgatgatcccctggctgaagatggctaataatgacccccacataaacgcgctatcccaaaaccggcgatgggattccgcggctttaaaacgaaattcaaacgccacgccgcggaatatcaggccaataagcatcgcggtaagcgggatggtcagggcgtcaacgatcaccgcgtaggccagcggaaaagcgccaaataacccggcgccgcctaataccaaccaggtctcatttccatcccacacgggcgccacgctattgaccatggtgtcgcggtgcgccttatcgcgggtaaataaaaatagcgcgccgatgccgagatcgaaaccatccataacgatatacatcagcgtggcgaagatgattatcgcaaaccagatgactgccagatccactcccatcagaatttctcctcactcggtaatttatccggcgccgataaaggacgcgctggcgttccggaggaattaagcgctaattccgattcaggctgaggccccagtttgagtagacgaataagatagagatatcccacgccaaacaccgcaaaatagaccaccacaaaggcggtcaggctgacgctcatctgcagcgtactatgcgctgagacggcgtcccgcgtgcgcaacagaccatacaccacccagggctggcgtccgacttccgtcgtgatccagccggccagaatggtcagtaaaccgacaggtcccatcgctaacgcaaaccacaaaaaaggtcgcgagtcgcataaacgtttatggcgacgtaaataccagccaatgacgccaagcgcgatcatcaaaaaaccggctccgaccataaaacgaaacgaccagaaaacaatcgtcgaattaggccgttcgttggcgggaaagtctttcagtgctggaacctgggcgctacggctatgggtgagaatcaaactgcccagggcggggatagccagcggatatcgtgtgcgctcttctgccatatccggtaggccgaacagtagcagcggcgtagcttcgccgggtttattttcccaatgaccttcaatagcggcaatttttgccggctggtgcttgagcgtgttcagcccatgcatatcgccgactacggcctgaatgggggcgacaatcaacgccatccacaatgccattgaaaacattgttcgaatggctggcgtatcgttatcacgtaataagtgccaggccgccgaagcgccaacgaacagcgcggtacttagaaaggcggcgatagacatatgtagtaagcgccagggaaatgagggattgaagattatcgccaaccaactatctggtatcacctgcccttgctcaatatgaaagccctgaggcgtctgcatccagctattggaagccaggatccaaaacgttgaggccagggttcctatggccaccatacaggtggaaaagaaatgtaatcccggcccgacccggttccagccaaatagcatcacgccaagaaatccagcttcgaggaaaaaagcggttaaaacttcatatgtcagtaaaggcccggtaatactgcctgcaaactgggaaaaaccgctccagttagtgccaaattggtaggccatgaccaggccggataccacacccataccaaaattaatcgcaaaaatatttagccagaaatgataaagctggcgccagagcaggcgccgtgtttttaaccacatgccttccagtaccaccagatagctggcaagaccaatggttaatgccggaaaaataatatgaaaggagatagtgaaggcgaactggatcctcgcgagatgaaatgcatcaaactcagccatcaggttccccttattgacaagatagtcagattgattgaccaaagaaagggtaaccgccagcggctaccctttctttgacggatgacttttatcccgtgcaggcgtacaacgtctggccagtttatctaccagaatttgctgcctcggggtcaatgacggacactgacagtgcgcgtcaaaatttatctctaatgtaatttgccgccctgctgccgttagcggcggcgcgctatcgttaatacgcgacaagatagcaaggagacggatcatttacagaccttttgccgctaacgtttggcatcaaaacccggcgtttcggagcggataatatattgctccgtaatatccggaatatgttgcagcaaccattcggccatacctctctcttccgccaaaatactttctaaatccgcaatcgaatcatgatcgttgaccttttgcgcggcggttaataaggaggtataacaggcgacctcaaactgctcgaaaacgtaaccgctgatcacccctttcaccacttcatcttgtggaaacattccaccaatagattgtcccatcgcggcaattttactcattgagtctttaagaaccgagcgggaaatattattgcgcgcaataatatcatccagtacggtaatttgccgacgggtctcaaaaagatgctgctcaaggcgggtgcataattccgggtagctgtcgatacgtttgaccatcgattcaagcatcgattcggcctgcttttccatagcgtgcgcgtcacgcaaccaatcgtgatagttttcaatatcagtcataacaacctctttataaaaagataattactcttcagccttatcttcattttcttctgcggcctggtcggctcgtgctgcgctataccctgataagtggccgacaatatttgcataaatactaataatgatgacccacaggacactgtctttccaccatattaccgacggtatagccagtacaaaccacattatcgccgcgacgagatgacacctttttattacaaccggactaagactcatttttttgcctgatgccttagataggattaagcggactgttgggcatcctgattgacgtgtccaacggcgatgtccgttaatttcatatcagcgtctttttcttcttccaacgtttccgccagcagtttcaccgcggctttatagccgagctgctctgccagcgtacacagcgtaccgtaggccgcaatttcatagtgttcaactttctgcgcggcggctatcagcgcagcatcgcggatctcgttcttttccgtcgcttcgatcacttcgttggcctcttcgataagcccttccatcgccacacacttcatccgtttcaggcgaatttgatcattttgttcaaggagcttatcaatacgttctatatggccctgtgtttcctcaaggtgagcgctgaatgccgtttgtagctcttcacatgcgctggcgcgggatagtttagccagcgcgcgggttaactgtttttccgcgctgtaggtatccgataataaatgaataaaaatatcttcaatggtttgtattttcataagtcacaccttttaaaaactgcgggtcggatgacccgcagggtatttttaacagcagttaccagatcaaatcacttatattcacaagctagctatcaccggatttacggccgccgccatggctgtttttaccgccttttttaccggcttcggatgcacgttccgggtcatttttaaaattcccgccgctgtgctgtccgcctttacgtccggcttcagatgctttttcccggtcttctgcaaaattacctgaaccacctctgtgttctgccataacgtttaccttttagcttggttagtaaaagatgatttaacgctctaaatcatcgccgtcgagaattaagtctggagcaataagtgaaaaatgcaaattaaataaaatatattaacagttgctatgaaattaattaaaaaataaatagcggagcggaaaaaataaccagaccatcgctaagatcatattaaccagaagaaataaacgcaacggcgcggccaaaatccacaacgacttgagcatgaaaaaatagaactgtaaataaagttaaatatttcgctgaataatctgaaaaataacccagcgaaaggttatatataaatcgccttatatcagtaagttggctaaggaaaagcgggaatatgtctattgggcagggatttacatttatcgtagcgtccgcataccttctatcattactcttttctgtgaaggagattgctatggataatgacaaactgcgtaccaaccattggccacaaccccctttccccgatcaaccgcaaacgcctcccggcctggccgccgaaatggaacccacaccggatcatggtgaagtcagctacagcgggtcaggacggctacagggtaagaaagcgctgattaccggcggagactccggtattggtcgcgccgtggctatcgcctttgcccgcgaaggcgcggatgttgccattaactatcttccggaagaacagagcgatgcggacgccgtcatcgcgcttatcaaagcggaaggccgtacggcggtggcgataccgggcgatattcgcgtggaatccttctgtgaaacgctggtggaaaaagcggtaagcggtcttggcggtttggatattgttgtgaacaatgcaggtcgtcagcaatactgtgaaaaaattgagcaacttaccaccgccgatttcgatgcaaccttcaaaaccaacgtctatgcgccgttctggataaccaaagccgcgctgccgcacctcaaagcccaaagcgtgattatcaacacctcttcggtccaggcttttaaaccgagccctattttgctggattacgcccagaccaaagcctgcctggtggcattcaccaaatcgctggccaagcagttagggccgcgtgggatccgggtcaatgcggtcgctcccggcccgtactggacggtgctgcagtcaagcggcggacagccggcggaaaaagtgcaaaactttggcggcgatacgccgctggggcggccagggcaacccgttgagatcgccccgttgtatgtgactctcgcctctgatgcctgctcgtatgcctccggccaggtctggtgttcagacggcggtgacggcgtactttaataatggaatgccggcagcaccagttcgccaatctcctgcatcgtctcggccagcggacgctggttgcgacgaaaatgcagaccgatatggttcacgccggcatcgcgcatcgcgttcaattcctgaatgagaccatggcggccgctgctgatgccgaaacgatggcgctgaatcggcgcattggcgtcatcttgcagatccaggtggataaagctgatatagggtttctcgcccgctacccggcgccacagcttgacgcggctaacgtgctcgtcaggctggccagggtaggcaagccagccatccatattactgcctacccattgcgccgtttgttgcgccaaaccagcaaccagcagcggcggggtcggtttggctggcagcaactccaggcccggctccagctgacgatcggtctcgcccttcagcacgctcacgccgtgacggaaacgctcgccgcggctggcgtagtcttcaccaaatagcgggtattcgaccggcctgtcgccgctggcgatgcccagtagcagtcggtcgccgctgagcgcctgcaccgtggcggcggctttacgtaccagccatggctgacgtaacggcagcacaaccgccgccgtgcccagcaaaatattttgcgtcaggctcgataaatagccgaggtaggtaaaggcttcaaagacgttagccgcatcgccaaactgcggatcgtatagcggaacatcgcggatccaggcagcgcgaaacccgagcgtatccgccagtttaatgcgctccgcgtgctcgctcatatccggcacgccaaacggtcgcccgtcgcgctgccgttttagctgtccgcttgtcgaccagtcattgtccagcggcagttccacgccaatcgttagcggctgctgggttaatttttcgatgctcatgggtcactccgtcaaccgccgtgcggtatcacgttgaaaatatgagcaaagtgtttcatggaatgctattgcgataaacagcactaatcgcaatagataattgctatttatggaattatctttagttctgattttgttttaatggaccgctcaccaacaccagaggaagaaacaatgataaaaaccgacgcctggctgtggaaaaggcacgcctccccgcttctgcttgaacgccatgagaaaacattagtcacgcccgctgacgatcaggtgctgatcgagaaccgcgccattggtcttaatccggtcgactggaagctgatggccggtctctccgacgcctggcaggaggatcagatccccggcgtcgacggtatgggggtgattaccgccgttggccgcaacgcccgccaccttcgtcccggcacgcgtgtgatgtatcacaccgacctgcgttttgacggtagctttgcccgccatacgttagtcagcgcccaggcggtgattgcagttcccgatcatatcagcgacctcaccgctgcggcgctaccatgccctggtctgacggcgtggcaggcagcgcaaaagatcccccttccggctggcgagaatgtactggtcagcggcgccggcggcgctgccggcagtctgctaagccaattactgattgagagcggcgctaacgtctacgtcacggccagcgccacgcatcacccgaaactactggctcgtggggtgattcaggcctttgattatcaccatacttcctggccgcaggagctaaaacgcgcgctggcgggtaaatcactgtatgccgctttcgataccgtaaatcagcaaaatgccctttcgcttgccgggttgctcggctactacggccatctggtctgtatacaggaccggctcgagcacgcgccgctacccgcgtttactaccagtatctcactacatgaggtcgcgctggcggcaatccatccttacggtacccagagacagtggagtcgattacgtcaggccggggaaagcatgctgcagcagatcggccgcggcgaactggtgatgccgccgatagaaagcgtcagcttcgacgagatcccgcaggcgctggaaaggctaaaacagaacaataacggtattaagtacgtagcggtgctgtaatatccatcagcacgatgaataacctcaatcccaaaaaccgggtaatcgatgccacatccaacgggcctctttccgctggatgaggcattcatcgcttcgcttccgtaggtcggtctggtgctgaatggttacaatagcctgggattcagcagagtgattagcaaaaatataacagctagatcgccaactaatagtcacacacatcgattaaaaactcagattgaaagaatcaaaaaaaggagtaacgttaaaaaaacattaacaaagaggtgcaaaatgttacgcgattatttaaaactggattctgaagaccaattagttgaacaacaaagcggtcatcaacctagccagcagtataccgaagtgactgagtgggtgatcctcaataaagagggtaagaaaaaaggccgcgtctccctgtttgataaatttaatactcgccgctcgtggaacgttaattttcgtattacccaatttgataacagcggtaaagttatcgttgaccaactgacagacgctatttaatagaataattaataacatagcgcccaatctgtgatggaaaccacctgacaaaacgctgaggccagcaaccgcattcacgcgggaaagcgtaagaagtttttcaactcatcaattagtcgctcgttttataataataaaatgagtactcgctgcgccttaagaaaaataaacgcgccagtcggcgcgtttaatcattaattgtttctgaccggcggcgtcaccctgacgccaataaagacaatcagcatggcgcttaataataacagcccgctgccggtaaatacgccgctggcgccgctgatatcaaatattgccccaccgccggcagccccggcgctaatggccagctggatcgccgcgactaataatccccccgcgctttccgcttcatccggtaccgtagtggcaagccaggttgaccaggccaccggcaccaggccgaatgcaaatccccacagggcgaccaacaggccatccagtagcgcaatatgaccatacagcaccatcatcagcgccagcaagctcatcgccagtggaaccagcgccagcgtcatccgcaaactgcgcgccagcagatgcccggcaagcgaggtgccaataaagttggccacgccgaaccccagcaaaatcaacgataccccttctacgcttgccagcgccacggtttcgagaaatggccgcagataggtaaagaaagcgaagtgtccgccaaaaatcaaaatcgaagccagcaggccgccaaccattcccggccgccgcagtaccttaaagagcgtattaaagctgccagcgctctccgggcgcatcgacggcagtacccatagctgccacagtagcgcgaccaggctcggtacggcgcagatgataaagacgttacgccagccaatgagcgcgccaagatagctacccagcggcgccgccactacggtggcaatcgacaccgccgagaagatgatcgccagcgctttcggcaccatcgccgccggaaccagccgcatcgccgtcgccgtcgacatcgcccagaagccgccgatagcgataccaagcagcaagcgccccagcagcaggaactccagtgaaccggcaaaggccacgatcagactggagatgatttgcaatacggaaaagaacatcagtacccagcgacggtcgatattgcgggtagcggaggtaatcaataaccccgtcaccagagcgattaacgccgtggcggtcaccgcctgtccggccatcccctcacttacgcccaggctgctggccatcggcgtcagtaaactggccggtagaaattcagcgacgatcaggccaaagacccccaacgccagcgcatacacggcgcgccacgccggacgggcgttaatcgcgctctcttcagcgacaatgcaagaactcatatacatctctccagaatcattaacattcgccaagcttagtggcttccgttaagacgatatatgatacatactctgcaattattgattattcgtccggaaaaacgatgagccagcaaaccttagatctgaccagcgagctgttacagggcatgcgactgtcgggtgtgaaataccgacggattgaaacctcacgtcctttcggcgtggagtttaattcggttcctggcaaagcgcagtttcattttgtcagccgcggcccgctgctgctacaaatgagcaacggtaaacagttctcgcttgagagcggcgatgcggtgtttattcccaatagcgatgcgcacgctctgctctcagatagcaaagccgcgcgggtgaacgtgatggagctcgacagcaaaccggtctgcgggacggtttcctgcatcaaaaacgcaggctgcgttaataccgaagagaatgcggttatcttcagcgcctgtatggattttgaattaggcggaatgcagccgctggttcgggccatgccggaggtaatgctggtgagtagcctgttaagcgcccgcccggaaatccagccgctgctggcggcaatggagcgtgaatccctgacgcgtcaggtgggctatgccggcattctggcacgtctcgccgacgtcgtcgcggcgctgatcgtccgcgcctgggtggaatgcggctgcggtaacgctaccggctgggtacaggtactgcgcgacccgaagctatcgcgcgcgatatatgctatgcatcagcagcccggcgtcaactggaaggtggaagacttagcccgcgaatccggcctgtcgcgttcggtgttcgccgaacgttttctcaccgccaccggtaccacgccggcccgctacctgacagaattacgcatgcgcctggcggtacaatacatcagccatgaaggcgaagcgctggaaaaagtcgccttccgcctcggctacaactcgctcgccgcctttagccgcgcctttaaacgcattaccggcaaagcgccgggagcgctacgcaatggggtcaatgaacaagcggtaacctgataagcgttatttcttctgccagttggcccacgggccagcgtcggcgggtttgtcgatgagcccttccagagaatcgagataaaagttttcgacttctttacgcgcccacggcgtgcggcgcagaaatttcaggctcgacttaatgctcggatcgcttttgaaacagttgattttgatatgtcgggccagttcatcccagccatatctggccacaaggtcagtgagtaacgcttcgagcgtcacgccgtgaagcggatcttttgacgtgtgcattgtctttcctgcatgaaaaatttcgctcaccatacggaccgcggcggcatcatgcaacatcccgccactttttttaaataacggctacgccgaaacccctctccttatctgtttttcgcaaaagcactgaacccaccgcggtcataaattagaaaagaacgttattggtcgaaaaaattgcgctaaggcaagctgagcgcatctacccgacagaggaaatcatcatgcgccgttgttgttgccgaacccagaatcacttcatagccaatgacccgtaccccgttctcggagaacacaatgaacgccacgactttgccgattctcgatctggcccgctataccaaccctgctgaaaagagcggttttcttgccgacctccgccatgccgctcgcgatattggtttcttttatcttattaatcacggcgtggacgccggattgcaagctgaagttcaacgccaggcgcgacgcttttttgctcttgatgatagcgaaaagcagcaggtggcgatgattcactcgccgcactttcgcggctataaccgcgcggcttccgagctcactcgcggccagccagactggcgcgaacagtttgacatcggcgccgaacgcccggctttaactctcgccgaaaacgcgccacgctggcagcgtctgcagggaccgaacttatggcccgccgcgctaccgtcgctgaaaccgaccctactgggctggcagcaggcgatgaccggcgtcgggatgaccttgctgcgcgcgtttgccgaagcgctacagttgcctgccgacgcctttgacgcgctgtatggcgataaaccgaatgaacatatcaaactgattcgctaccccggtcagcgtgaaaccaaaagcgcacaaggcgttggggcgcataaagattctggattcttaagcttcctgttacaggacgagcaaaaaggactgcaggtggaagtcgcgccggagcactggatcgacgccacgccgctggcgggcagctttgtggtgaatatcggtgagctacttgagctggcgactaacggttacctgcgcgccaccgttcatcgcgtggtctcgccgccggcagaacaggaacgcctctcaatcgccttctttcttggcgcgcagctcgatgccgtggtgccggtgtaccgcctgcccgcccatctggcgcaggaagcgctcggcccggatagcgatccgcaaaatccgctgctgcgggatgttggctggaattacctcaaagggcggctgcgttcccacccggatgtcgccgaacgttattaccaggatgtttttcgcgaacgtactgagcaactgatcgtttaatttaataaggataacaatatgaaatatgccgcattcaaactggcaggggtcgctttatctctttctctggcatggacatccgcccaggctgccgcgctgcgcgttgccgctgacccggtgccacacgctgagatcctcaattacatcaaaaaaatcgatcccagcctcgatatcaaagtggtcgaactcaccagcggcgttaacgccaacgagctgctggcgaatggcgacgttgatgccaactacttccagcacgttccgtatctgaaggatcaggaaaaagcgctgggtaagacctttgccgtcgccgctacggtgcatattgaaccgctgggtatttattcccgtaagcacaaagactttaattccgtcccggaaaacgggaccgtcgcggtgccgaacaacaccaccaatctcagtcgcgccttgttcctgctacaaagccagggattaatcaaactcggcgctaaattcaccaacccggcgaccacgttagctaccccgaaagatatcgtggaaaaccccaaacatctgaagatcctcgaaattgaatcgccgcagatcccgcgttccttagacgatgttgatttagcggtcattaacggcaactacgcgctggaggcgggactggtaccggcgaaagatgcgttagggctggagagcgcgaacaacaacccttacgccaatatcctggtgacgacgccgcaattggctaatgacccacgcattaaagcgctggccaaagatctcacctcgccgcaggttgccgaatttattcgcaaaaactataacggctcggttatcccggttgcgccgcaatcatgattgaggtcgtcgggctgagtaaaacctatgccggaacaggccgaccggcgttaaacggcgtgtcgctgcagatcccgaaaggcgcgatttatggcattctcgggcgcagcggcgcaggaaaaagcacgctgatccgctgtctcaatttactcgaacggccctctgcgggccgaattgtggtgaacgggcatgatatcactcagttagacaaagccggtttacgtcagcaccgtctgcgcaccggaatgatcttccagcacttcaacctgctgcatgcccgcaacgtggctgacaacgtcgcggttccgctggaaatcgccggtgtcgacaaacgtgcgcgccgcgaacgcgtgctcgagttgctggagttagtgggactggcggataaagcaaccgcctttccatcccagctttccggcggtcaaaagcagcgcgtcggcatcgcccgcgcgctggcggccggcccggatgtgctgctatgcgatgaagcaaccagcgccctcgatccggaagccaccacctcggtgctggcgttactggccgatatcaatcagcggctcaatctgactatcgtgcttattacccatgagctggaagtcgtcaaaacgctgtgcgatcacgcggcgttgctggagcatggagaagtcatcgagagcgggaaaatcgccgacctgctggtggcaccgtggtccagattacgtcagtcgttactgcataatccgcaggcggagcaggatttccttgcccgtcacggctttcacgggaggcctttatgcgtagtcgcatgagttgggaagatttatggcccttattgtgggaaggcagcctggaaaccctctatatggtaggtctggcggcgctgtttaccattttaatcggcctgccggtcggcgtgttactgtttgtctcccgtcgcaacggcctggcgccgatgccgaaactgaatgcgttgctgggggcgattattaattttggccgctcgctgccgtttattgtactgctcattgcgctgatccccttcacgcgtttgattatcggcaccaccttaggcagcaccgccgccgtcgtgccgattaccatcggcgcttttccgttcttcgcgcgactgaccgaaaacgcgctcgacgaagtggattacggacgcattgaagccattctgtcgatggggggtaatctgtggcacgttatctttaaatcgctgctgccggaggcgctaccgaccctgcttgccgggatcaccctgactatcgtgatgctgattggcttttcatcgatggcgggcgtcattggcggcggcggtcttggggacctggcgattcgctacggttatcagcgctttaacgatcaggtaatggtcggtacggtactgattctggtggtgatggttcagggcgtacaaatgatcggcgacaggttggtacgacagcttgcccatcgccgctaagctctcattcgcaggcggctactgcaggccgccttcctccacgagaaccctgaccagttctgccgccggcatttcgcggatcatcgccaccccttgtcccgcccagtgcgcgccgaaaccatgatcgccctgcgcttttgccgccgtcgccagcgcttttccggcgtcataagcgagcggataggcgggaatttctccttcgccgatttcgtgccagctatttttaacgcagcgtgctggccgacccgaaatagccgctgtcaaaaatgtgacaacgtcactattttgcgtgagcgcctgtcgatatccactatctatacccgcttccgggcacaataaaaatgcggttcccagctgaacgcccgacgcgccgagctgcatcaggctggctatcgccgccccatgcataatgccgccggcggcgacaatgggtaaatcgacagcctgctttagagcctgaagcagagtgaaggtgctcatttgacgatcgtcgccgtgtgggtcaaaaatcccccgatgaccaccggcctcatacccttgcgcaataacgacatcaatacccacttgcgcaattaatcgcgcttcgtcgacgcaggtggcggacgccatcgtcaccgttccctgttgctggaagcggcgaataacctctgacgacggcacgccaaaatgaaaactcaccaccgctggcttctgttcaagcagcatatcgagcatggattgatgttgatggaaggtctgataaatctcgttaagctgtttcggcggcgtgccgtgataacgggcaaacgccggagccaaccgcgccagccactgcgcttcctgaacggcatcgcggcgcgacggcgtatgacagaaaaggttgacgttaaaaggacgatcggtgagctgccgggtttgttcaataagcgcctgcgcctgcgtaaccgtcgacgcgccgagccccagcgaacccaatcctccggcgttgcttaccgctgcagccagggacggcgtcgacacccctgccatcggcgcctgaataatcggataacgaatattaagtaatcgcggtaaatgctgattcattggcgatcctgtgcaatttgcgatgtgaggcattaaccatctctttttaagatgttaagatcaacaatattgtcatattgagaagaaaaatatgaaccacaccacattactgatctttaaactggtggccgaaacccaaagcgtcactcaggcggcgaaacaacttggtcgcgcgcaatccaatatcaccacgcgcattcagcagcttgaagaggagctggaagccgagcttttcgtacgcggaaacaagaagatgctgctttctcccgccgggcaaaacttcctcagctacgcgcggcgaattttaagccttgccgaagaagccaaactggcgctgcaccctgcacggcccgcgggaacgttaaagctcggcgcgatggaagcctgtgccgccagccgcctgccggccatattgcctttgtttcagcaacgctgcccggacgccgacctgacattgcgtaccatgcccacccgtcagctgactgaactggtcgaaaacgcaacgctggactgcgcgctggtttcactgccggccggtccagacggcagccttcaatgcccacagacgcttgaatatctaccgcttttcatcgaacagctggtcctgatctcccctgttgatgggcgcgactaccgctttgccgccttcccggcaggatgtacctaccgccagcgcggcatcgaatatctgcagcagacgggaacgcacgtggacatcgtcgaagtcagctcctatcacgcgatgatggctaacgtcgccaccggtcgctacgcctgtttgctcccggaaagcgtcctgcccctgctcacgctgcccgcaggctgccagacgcaatacgtcacccaggccgccacccagcttatctggcgccgcgggtatgtgtcgcctattctcgacgccctgcgccagttattgctggcgccggccgcaggcaaccagcccggcagctcccagcaacacgccgctggccgtcaatagtgaaggattaaacgatcccgtcaggctgtataaaccatcggcgaccagcggcccgattatctgtccgacgccgtaagtcgccgtgagcgcggcgatcatattaaattttaccgcctgatttagccgcttgccctctgacaaggcaatggttaccgtcccaaggaaggtcgctccaaccagcagcgcgctcaacagacaaaaggtgaatgagtggctccatgccggtaaggccacgccgaaggcctgaataacgagattgctacaaaatgcccgctgatagccaattttcagcacgagttggtgccagataaaacaggaaggtaccgccgcgagaccaaataccgcccacaggtgcaccgggtcgatacccgcgagcgcgccgtgcaaaaacagcggcaaataggtcgcggtgatgatgtagccaaagcccgcgaggccataaatcagcagcaattttaccgcatcgctcgtgcgcccattgtcgctcggcatcgttgttgcgggcccgctgtttaacgccagcagcgaatccgccgggcttaataatccgcgcaaggcgcataaaaacagcatcgtcgccgtgatggcgcacagtagccagatttgctgactgctaaacgccagcgctttaccggcggcaataaactccgccgacaaaaagatccccatcccgacaccggcaaacagtaccggcgcgccgttatgatgtttcatatgttgcagtagccataacgaggcggagataagcgttaccgcgctgagcaccccggccaacccgcgcaggataatgatagccagcggcgaacgcagccaggccagtagcgccagacaaattagcgtcagaatgaccgagacaatattcattctggtcgcctggtccggctttgccttcgccagtaacaatgcccccagcaggtacccggcataattagcggaggcggccagattcccctgacgcagcgtcaggatctgatcgcttaacatcaccggcaggatcccggtgaaggcgaagcggccgtaacccataccaatcattaataccgtcgcccctgccatcgctaataagaaagcatttatctccggcctgatttgtcgcatctgcgttacccctcgcacagtttaatcttaaaaagagaatattaattaattttaattctctttttattatgtattagcgtgatgcgacgagcaagccgccgcgccagggcaaagagtaaaagcaccaaccagaggatacttcggttagcgacgaaggatggttgtcaaaagcgcacggtcgttaaacgccgtactcgataataggccgcattatcttcagcgcagcgctcagtttatcgaggctcggtgacgccagcgccagacgcaaagcatgcggcacatcacgaccgacgctgtaaggttcggcggtggaaatagcgatattcatggttagcagctgtttcacgacgcgatcggcgcggatctcctcgcccaacggcagccaaaggaaccaggcattttcattgccgatcattggtaagccagccaacgcctgacgggcgatggcctgccgccgccgcgcatctgcgcgcattatggtttcgagccgggccagcgtcccatcctggatccagccgcagaccagcgccgtcgttaaggccggcgtattccagctggtggcgcggatcgtccgctctatcgccggcattaacgcttcgcggcataccaccatgccaacccgtaaaccggtggcgatgttttttgaaaaaccgcacacatagaccgtacgctcaggcgccagcgacatcagcggcggcggcgtgttttcaatcaaccacgcataggcggcatcctcaatgatgaacaaatcgaactggcgggcaatatcaaccagttgactacgctgcgccagattcattacccagccaagagggttatgcagcgtcggcatggtgtaaatcgcttttacccgccgtttttcacacaggctgcgaagcatatcgagatccggcccttgtgttgtgtgcggaatagcaaccagttcaagttgatagagcctggcgagagcgcgaaatcccggataggtcaaggcatctgccgcaaccacatcgccgggacgcagcaggccgccgagcgtgaccgccagcccatgctgagcgccgttaacgatagcgacctgcccggcgctggccgccataccctgtctgttaagatgctgggccactatttcccgttcgctcatgcgtccggcgtgcggttgatagcgtaacaacgcttccagatcgcccgcgccagagagtttttttaatgcctcgcgcaggagaacggtttgttccggcaacgccggagagttgaaattaagatcgatcatgtccggggcaatggcgtgctgatcgacacccagccccggcggcaagctcagttcacgcacaaaagtcccgcgtcctgtttcgccgctgaccagccccattaacgccagttcacggtagacccgcgtcgcggtagccagagaaattccgtgttcaacgaccaattgccgatgggtcggcagctggcagccagccgccagcgcaccgctgcggatagctgccgcatagcgatcaaccagagatttatagcggtttttcatcgtcattgtatccatgacaattatttgattgtcatggattgtgcgacctactatcgacccggtcaaccacattaactatcactacaaagaggtcacacgtgcacaaccgtcgcacttccacttctatatccggttggataaacggttttatcggcgtcgctatttttagcggctcgctacccgccacccgcatcgccgtgcaggagttcgatccttttttcctgactttctgccgtggggcgattgccggggtgcttgcgctgggcctgatctggcttttacgcctgccgcgcctgcaagcgggacaatggcgttcactggcgctggttgccggcggcgtggtcatcggttttccgctgctgacggcactggcgttgcagcgggtgacgtctgcccactcaattgtttttattgggttattgccgctagcgacggcgattttcgcggtgatccgcggcggtgagagaccgcgccctgccttttggggattctcgctgctgggcagcatactggtagccagtttcgcgctggccggtaacaccgggatgtccatttcaggcgacctgctgatgctggcggcggtagtggtctgcggattgggttatgccgaaggggcgcgcctcacccgagagcttggcgggctggcggtcatctgttgggcgctgcttctgtccctacccctgatgttgatagcctgcggtttaacgattcccgtcagtttccgtggtatcagtgcgtctgcatggacggcgctggcctatgtctcgttattcagcatgctgataggttttatcttctggtatcggggactggcaatcggcggtattgcggcggtcggtcaactccagctattgcagccctttttcggcctggcgctggcggcactactccttcatgaatcagtgagcccgttgatggttgccgtcacgcttggcatcattttctgcgtgatcggttcgaagcgctttgcccgttaaaatagtcggcagcctgatttgaggcgagttcctctctcaggctgtctttatcatcaattaaactgtggcgcgaccgaatggccgcaggcgctgttagcgtcaatggtgtcgttcatgcaggtctgcgaatcaaggccctgacccggcgccatccccgaggatgatgaggaacctcctgaacaggcggatacagcaaaaacaatgagcaatataagtaattttttcatcgcgatgacctccgggaagcaaataggttgccgtgctccatcctaagactggccactcatccatttccctttcaaactcaggtatcactctaagaaataatatgggcgttatttatcatctgtatagctatattatcggtcattttgccaataaatgaaccgagcgttggcataaaatgctcgcccgctcgccggagccgccgcgcttgcgctatgcttaacctccctttcgttttaaacacttagcgttatgactacttctgtcagcaccactcagcttaacctgcgtattatttccatcgtggttttcacctgtatctgctatctctccatcggcctgccactggcggtgcttcccggctacatccactatcagctcgggtacagtacgctaatcgccggagtcgttatcagcctgcagtacatttcaacgcttgtaagtcgacctcacgctggccgctataccgatatctgggggccgaaaaaggtcgttagcctcggcatcatctgctgcatgttaagcggactcttcaccctcgcggcggtgatgttgcaagctataccacttctcgccgtcagcgccctgttgattggccggattttcctcggcgtgggagaaagctttaccgccaccggggcgacgttatggggcattaaaaccgttggcgcgattcacacctcgcgggtgatttcatggaatggcgtcgcgacctacgtggcaatggccgtcggcgcaccgctgggggtgatgctcaatagctattttggcatcagcggttttgccgtagtggtagtgctggttgcgctaattggcctgctctttgcccgcacgcgacaggatgtcagcgtaaccgccggagtgagagcgccattccatgtggtagtgcgcaggatctggccctacgggctggggctggcgctgggtaccgtcggctttggcgtcatcgccacctttatcaccctctatttttcggctcaccactggcaaggcgctgcattcacgctctctctcttcagcatcggttttatttgtatacgcctgatccttggcaacaccattacccgctacggcggcgtgccggtgtcgcttgtctgcttcgtagtggagtgtcttggattattgattatctggcaggcgccgtcggcgtgggtcgccggtattggcgcattcctcaccggttctggtttctcgctggtctttccggcgctgggcgtcgaggcggtgaaacaggtagaagaacaaaaccagggtacggcgctgggtacctattcagcctttctcgatttggcgctgggtttgaccggcccggtggccggttgggtggcgggttattatgcgcttgatacgctgtatctgctggctgcggtgatagtcgccatggcgtttatcctgctgcttcgggttcgtctgcaacagaccagggcgaacgtatgatgtatgccgattaatcatgatactggtaacaatttaatcaataattgacgacgctttaatatccgtgccaccattccgcgagcatccagtcctggatgccgggcggtacgggtgcagtgatagaggtcgtcaacaaaacgatccccccgtgacctggctccattcgactcgtcgcctgatgcggcgagcggcttaccctggcgggaaataccgacatgcatcaaagtttcaaccagcgagtccatttttactactgcattctggtcgcgctgaaaatccacgtaaaaacgaaaaaatcgggcggagcgagagggaaaaataactttcttctcaaatggttgcgtaaagcgcaggacaacaacatctttcacccggatatcaccagcgaaatcgaatggctacgcggtaaaattatccaggccggtcatgatactgaccttgagccgatgctggaattcgtctatgccactgcccggcgcgccgaaatgctcaaagatgccgactgatccttattaagctagctgcaaaatatcgccggtagccggtgcctgcgcgccggcgagccacagttttccccaggcgccggtacagtggcaggccaaaattttctccacctgcagctgatgtaagtaacttctcacctgccagaccctggcgacggatgcggcgcgcaggtgtagcccgccgatcaacgcgtggaccctctcaatgccggtgatattctgacaatgccgcacaatgttctctacgccgcgatgtccgcagccgcagatgatgaccagaccgtggtcggaaagatagataaggacgccttcatcgacgatataatcaggcgtcaacggcgagctggctaaaacgccaaaggattgcggacggtttaccacgatctcgccggaccacaacagacgttcgctgatggcaaacggctgccggtagcattccatgcgaaagcgggaatagtcgagctcaagcgagagttttttgattttgcgtacgtgccggccaaggctgatagcggcatagcgcggttgggtaagctgtggatgacaaataattcggctcccctccggcagccaggggacgccaccgcagtgatcgtaatggccgtgtgataataccgtcgcggtcaagttatccagtttaatccccatccgctgcgcattcttaagaaaactgccgtcagggccggtatcaaacagcactttgctggtttcatcctcaaggagcaggctaagtcctgctttggctgtcaacgccggatcgtcgtgcgccgcaaggcgattttccagtaataccctgatggttaaggccattatttcattcatccctgttatatatgcacgaccagtgtaacgaagaaaccctgcaatctgtgtgatgagcgccgcacccttcactccgaaaaaagtgacaccgtcactaaaaaacagcttcacaaccgcgctacgtcctctatgctgatagacgcggatcgttaacttgaggttatctatggcagactggaatccctcgctgtatctgaaatttgctgatgagcgcacccgaccggcggctgagttaacggcgcgtattgcgcaacagccggtcaagctggctgtggatctgggctgcggtccaggcaacagcacggccttactgcgtgcagcgtggcctgaagcgcgaattattggcgttgataattccgccgccatgctggcacaggcggcgcaagcgcttcccaattgtgagtttatcaccgcaaatatagaagactggcagccatctgagcccgcagacgtgatctatgcgaatgcctctttacaatggctcacagaccatcaaacgctgttcccgcgactggccggccagttaagcgatggcggcgttctggcggttcagatgccggataactggcaagagccctctcataccctgatgcgtcaggtcgctgaagagctgggatttccggaaagtggccgacagccgctcccccgcgtccagcagtattacgacatgctgagcaacagcggttgcgaggtggatatctggcgcaccacctattatcaccctctggaatcgcaccaggcgatcgttgactggctgcaggcgaccggtctgcgcccgtatctgcaaaatcttgatgaagcagaaaagaacgtgtttttagagcgttatctgacgctgttacaacaacattatccgttacagtgtaacggaaaggtactgttattgttcccgcgactgtttattgtcgcgcgacgcctggttaacgcgtagtcgccagttcgacatcaacgttaagcgcattcagctgatttaccacgctgctactaagccggtcatcgctgatgatgacatcaagctcgctcagcggcaggatcaggtaattcgccatttttccatattttgatgagtcgcttagcaggatacatttttcacttaccttcgccacggtctgtttcacgatggctttattttcgttgggcgtcgacagtccgcgcaaattccatgatgacgccgaaataaacgcgacatcgataaacaggttctccagcatttttgccgtcaggtggccaacggtcgactgattctcacggcataagcgtccgccggtatggatcaattcacattgcccgcgttcaatcatcaaattggcaatggcgaaatcattggtgatgatcagcaagtcctgacgctcaaccaggttttcggccaacgcgagcgtcgtggtcccggcatccagatagacggtgctgttcgcgggaatatgcttaagcgccgccagaccaatagcctccttttcctggggaaacataagcgttttatcgcgatgcgaaggttcattcagcaggcgggttcgttgcggaagtgccacaccccccgatacgctggccagcacgttaagctgctccaggcgctgaatatcgcgccggattgtcatatgcgacacgcccagcgcctcgaccagttcgacgacgctgaccacccctttgtctttaatgatttccaatatcttctcttgtctctccaatggcagcatcgatttctcctgatggtgtctcgctatctcatattttcacattttatcacatcatccagggctgtacaccggattaacagtgccagttaatgtgaaaaatagataataaatgttatttattgtgatcgtcgtcgctgtattcatcacctcaatcattgatattaacatttaacaacagataataccgtaaattaacactcgctgtatgaggggacaggatatgagagcaggcataattgccgatgattttaccggcgcgacggatatcgccagttttctggctaataacggaatagcgaccagcctgtttagcggcgtccccggtgaagattaccagggcgatgctcgcgcattagtcgtgagtctgaaatcacgttctgtttcagccaaagaatctgtgacgctgtcactgaatgcgctgcgctggttgcaacaacaggggtgcgatcgtttttattttaagtactgctccaccttcgatagcacgatcgaggggaatatcggtccggtcaccgatgccttgatggatgcgctgggcgtcgcaaccacggtgatctctccggccttgcccattaatggtcgtacggtgtatcagggacatttattcgttgaagaccgcctgttgcaggagtccggtatgcgtaatcatccggtcaatcccatggatgacagcgatctgcgccgtttaatggaacgtcagtcacgcggcacatgcgcccttatcaatgcgcagattctggaatccggcgaggcggccgtgcgcgacgcgctccaaaccctatccgccgcgggctatcgctatatcgcgctggacgcattaaacgagaaacatctgcaaattcaggggcaagcgttgcacgatatgaagctggttaccggtggttccggcttagccgcgggtctcgcgcgttgctgggccaacgccacggagccttcccttccctttagcgtcaccacgccagcggcctgtacggtagtattatccgggtcctgctctatgagaactcaggtacaggtggaaaaataccgccaacaggcgccagcgctggccgtggacgtggcaggtttgcttgataaacgctggacgcttgatgagtattgcggtcagatcgttgaatggctgcaccagcagtccgacgcggccacggcgccaatggtttacgccacgacttcggtcgcagagctgcacaacatccaacaacgctatggcgccgagccaagtcggttgatcgttgagatgctgttttctcaattagcaaaacaacttgcgcagcaaggcgtgagccggttcatcgtcgcgggcggagagacctccggcgcggtaacgcaagcgcttgatattcgccatttcactattggcgccgcggtctcacccggcgttccatggatcaaggcagattcccggccgcttttcctgctgctcaaatcgggtaattttggcgatgacaatttctttgcccgcgcgcagaccgcggaggcttgcgcatgaacgagtcatccttacgccaacagatggtctctatcgctcgctctttctttaatcgcggctatgcaaccggttcggctggcaatctttccgtccagcttgctgacggcacgattctggccaccccgacaggctcctgtcttggcgagcttaacgccgaagaattgtcgcacgtgactctgagcggtgaattgctctcgggtttaaaaccctcaaaagaggtgagttttcatctcgcactgtaccgcaacaatccgcagtgtcgcgccgtcgtccatctgcattgccattacctgacggccctatcctgcctgcagaacctggacccggctaataccctgccggcctgtacgccgtatgtggtcatgcgggtcggcgaaataccgctggtcccctatttccgccctggcgatccgcagattggccaatggctcggcgaacgcgccgcgcagcataaggcttttttgctggctaatcatggcccggtggtggtgggcaaatcgctacgcgatgccgccgacaatctggaagagatggaagcgtccgcccgcctgttcttcacgttgaaaaacagcccggtgaactatctcgatcatcaacaaatgactgtgcttcgaggaatgcaataatgttgaaacttgctgccaatttatcgatgttattcggcgaaaatccgcctctggagcgcttctccctggcggccagagccggttttaatgccgttgagatgtggttcccttacgaatatcccgtagagaccgtcgcccgcgaattagagaaacatcacctcaagcttatcggcattaatactccggcaggcaataccgcacgcggcgaatggggattatcggctttacctggccgtgaagaggaagcccgcaaagccattgatttagccattcactatgctgcggctctgcagtgcccggcgatacatgttatggcgggcgtcaccgaagggttcgatcggcagcactgtgcgaacacgtttattgacaacgtacgctatgcggcggatctggccaaaccgcataacatcaccattttgcttgaaggtttatcgcccgccacccgtccgggttatttattttccagccaatatcaggcgatggaatatattcgccaggcggaccgcgacaatattcgactgcagcttgatgttttccatgcccagcaggtcgatggcaatctaacgtatttattgaaaaactataaagagtatatcggccatattcagattgcgtcggtaccggcgcgccaggagccgattgacggcgaagtggattatcaatggattttcgccgtactcgagcaggaaaaatatgatggttacgtcgccgcggaatatagtcctcgcgccggaacgcaagccggactggattgggcgcaagcctggttaaataactaaaacctacataatatcaatgcctcagtgagcgccggtgcgcgctcatttttcggagatagaactatgtcaaaccactctgcgttgagcctggagggcgttgcgcctgccataaatgaagagttagtgtggaagaaagtcgtccgccgcacgctgcccttattaatgatttgctatattctggcctatcttgaccggatcaacgtcagtatcgctaaattacaaatgtcgagcgatctggcattttccgacactgtttacggtatcggtgcgggaatatttttcatcggttttttcttttttgaaattcccagtaatatgatccttcatcgctttggcgccagacgtttacttggcggtttacttatttcgtgggcgctcattgcgccgctgacggcatttgtgcgcacgccgctggagttttataccgtgcgcttctttttaggcgtggcggaatctggcttttatcccggggtaattctgtatctttcgttctggttccccagctatcgccgcgggcggatgttcgccctctttgctaccgccgtaccgctttccgggatcctcggcgctccgctctccgggtggattatgggccattttcatgagtacggcggtctcgctggctggaagtggttgtacattattgaaggcgcgccatctctgctcattggcgtgctggtgatatttctgctgaccgaccgcattgcgcaggcgaaatggctgtcagatgacgaaaaagcgttgctcgaggcgcgactgcgtagcgatggcagccataagaccgaacagcatggttcgatgctggctgttttgaagaatccgaaggtgtggttactgacttttatctatttctgcctgattgccgggttctataccgtcagtttttggatgccaacgctgattcataacgccggtgaaggcgatgtgctgaaagtcggattgttaaccgctattccttatgccgcagcgatagtcaccatgattgccgcttcgcgcagcgccgataaacgtagagaacgtcgctggcatctcgccgccatcgccgtcatgagcggcctggggatgattattgcggcgctgttcagccacgatctggtgattgcgatgatcggtttaacaattggcgccgccggcggattgagcaccctaccactcttctggagcctgccgacggccttccttggcggcgcttccgccgcggtcggtatcgcggtaatcaactcctttggcaatctcgccggctttgtcgccccgtggattatgggcctgctcaccgatatgacccattcgacgctaaccggcaccttaatcatctccgcgacgctgtttatcggcgctgcggcgatattccgtattcctgcccgtatggttaaccattaataatattgagaaaatcaccatgaataataaattaacgattgccgtcaccggcgccgccggatttcttggctcccaactggtcaaggcgttactccagcgtggctcattgaccggcccgcagggcgaaacgcaggaaatcggtagactgatcgctatcgaccgcgtggcgttacaggggattgacgatagccgtttacaggtattaaccggcgacatcagcgatagcgaatggttacgtagcgcgattcccgctcaggtcgatagcgtctttcatttagccgccatcgtttcaagccaggcggaacaggacttcgagctggggatgaaaatcaacgttgatgccttccgccaactgctggagtacctgcgtcagttgccgcagagcgtcaaactggtgaccaccagttcggtggcggtattcggcggcgacttgccggaaaaagtgagcgattcacaagtatggttgccgcagagttcttacggcacgcaaaaagccatttgcgatctgttactggcggattacagccgtcgcggttggcttaatggcagaagcctgcgcatgcccaccatcgtcgtgcgaccggggaggcccaatcaggcggcatcgagttttgccagcggtattatccgcgagccacttaatggggaatccgccgtttgcccggtcacggcggattcccgtctgtggctgttgtcgccccgtaacgcaattaaggctttaattcacgggcacgaactggctgaggcacagttgacggacggtcgggtgattaatctctgcgggctgtcggtcagcgtcgaacagatgatcgtggcgttgcgccaggttgccggcagtgaagtcgcgcagcgtatcaccttcaagcccgatgccgccattgaacgcattgtcaattcgtggcccggcgatttcgacacgcgctatgctcagcgtcttgggtttagcgccaaccatagcttcagcgaaatgattgaagagtatatggcggattacctcagctagggtcagtatcagcggcgcccgaaggcgccgctgcatgttaccaggggaagtcgtgaaccagcgaaagatcccaggcggtggccagtaacgacagaaacatgattagattaacggtagtttcgattcgtttttccatgctgcttctcctgtgtcgcactgctagagcttcatcagataccgaacataatcgtccgcaggggtgaattcatcatacagtcggcgtgcaggattatcgtgacgggtgtgccagtagagccgcgaccatccctgaattttaccttcagcctgcagcgttcgaatcagcgttctcgcgactccccgtccgcgggcttttggtgcaacaaacaggtcttccagataacagataggcgtcgttacccaggtgccttcgtgaagtacgcagatagcaaaccccagcacctcgccatcaaccacggccacccggccgatcaccggagactgcggatccagcaaacgccgccaggtatgttcggagacgctgtccggctgcgggctattatagaactgcgtgtacccctcccataacgctcgccaggcgctgtaatcccggtcagtaggttcacgtatgtctatattcattgatgggttctccgcacgctaaacgtcatcgttaagtcattattttgctttctgaaaatgacttcaagcggcgagtgcacattttatctttttcctccctactaagcgatgcaggtacggcgttactgcaacggtttattgctaacaacaaccagaatgttgtaactaatgaaagagattaacccggcagcatgccgggtcacttcagttgacgtgttagcacagcggttttacggcgctgcgcatgccgtcacgtaagatagcatccagattagccgttacctgcgccgtcagtcctggcacctgcgtcagatcctgctgccagtgcgattctaccgacaacaccgacgttaccagatcctgcgttgcaagctggccatcgcgatgctgcgcccacagcgtctgaaagcgtgcgatccactccgcgtcgtcctgaaccgggtagacttcaccgttacgctcgccgcggtagaaggcgatcaatgccgccagcgcgaaagtcaggcgcgctgggagcttaccgctctgcttctgccctgccagcagctgcggcaggatacgtgtacggaacttggtcatgccattgagggcgatggataacagttggtgtttgatataggggttgcggaagcgtcctgttaccgcgctggcgaatgattccagctcatcgcgcggcagatcgagaaccgggataatctcctgatatatcgctttttcgacaaatgagcagacttccgcgtcgttcatcgcttcaccgacggtgtccagaccggcctgccaggctaccggcaccagtgcggtatgcgcgccgttgagaatcgctaccttccgttctttatagggtttgatatcgtcaacaatcagcacattgagcggtaatttatcgaggcgcagttcggcggccagcgatttcggcccctggatcacgaacaggtaaaagtgctcggcggtatcaagaaaggcgtctttatagccaagctgcgtttcaatctgctccgcttcatcgcgcggatagccggtaacgatgcggtccaccagcgtcgaacagaaggtgttcgcctctgaaagccaggcggcgaaagcagccggcagcgcccattcacgcgcatagcgcagcaccagttcacgcagcgcctcgccgttataatcgatgagctcacatgggatgataacccagcctttatcggcggcgccggcaaaatggctgaagcgttcgaacagcagccgggtcagtttcgccggataacttaccgccggggcatcgtcaaaacggtccccggcatggtagctgataccggcctcggtggtgttggagaagacaaaacggatatccggattgtgcgccaggcgcagaaattcatcgtaatcgtggtaggcgctaatttcgcggtttaccgaacgaataagacgcgcatcgctaaccgcttcgcccttttcattcagtccgcgaataatcgtggtatagaggccgtcctgagtgctcagcgacggcgggaaatcgctggcgatgggtcggacgatgaccacgccagcattcaggtcagtatgctcgttaagcaggtcaatttgccagtcaacaaacgcgcgcaggaagttaccttcgccaaactggatgatacgttcagggtactgcgcgccggggaaatcacgacggtttaaggttttcacaatgggatccctcttagagtagtcatacaacctgagtaattggtccaataagttatcaggttttatgctttgcaaaaccccgttttgatcaaacctcttcgcattattctgtcgccgggaggatcttatagaacagcgaggtacccgacatttccccgtcaggcattaaggcaaactgcggaatttcccccgctttttgccagccgcactgctgatagaagcgctctgcgccgctgccggtggcggtatccagcaccagcacggttttcccatgcgccagtgcaatagcctcaagctcgctcatcagcaacccggcgatcccctgtcgacgcgcattttggtgaaccaaaagcttggcgacatcggcgcggtgcggctggttttccggctggtcgataatcaactggacggtccccactatctgccgttgttcgttttctgccgccaacacaatccgctcgccggcggcgacgctttgcgccatccgctgccagaagcgctcgccggtgtccggtgaaaacggctgcataaaactgaccgaagccccgctgttcacgcagctggcgaggatttcatttaattgcggaaggtattcaagaatagattcacgcgtcagcgtgcgaagagaaaaggatgtggccatagattgctccctgaaaatgaccacatcactatgtttttaactaatatttaactcaagcaaaaagaccatcggattttcttatcacacgccgtcaggcagcgcctgcacgcaaacgcgattgcgcccggcctgcttggcgttgactaacaggtcatccgcttccatcagcagctgattaaacagctcggcgatccgtccttcaccgacttcacggcactgcaggccgagactcaccgtcaggcgaatacgctgctgcccccaggtgaacgtttccgactcaatcccctggcgaattttttccgccagcagatgggattgttgagcattatcgagcagcgccgcaacggcaaactcttcccctccgatacgcgccaccattccctcttcgcccgccagttcacgtacgcgctgggcaaactgggtcagcacgcagtcaccgcattcgtggccccaggtatcattcacccgtttaaaaccatcgatgtccagcaccatcaccgagagctgtttatccgggtgcggcgcctggcgtttcagcgcctcgcccaaaccggaacgagagtaaacccgggtctgaaaatcgaagtcagcgcggagcgccagctgttttaccaggttgttgatagcttcgacgctggtcgccacgatcaccgggctaatcagcatcgccgccatgccgagacgggttgaaaacagctgccacggctgcggacgcgcatccggcgacagatggataagcgagttcgccaccagcagaatctcagtgataccggtaataaacgtcagcaggcaggtcagcggcaatggatagcgaatcgcgcaccagatcagcgccggcagcgggaaagtcaggcttccggcgccgcctaccgccacgccgagcgccatcgatagcaccagcgctatcaccggcagtagttggctaaagcgaaagcggcccagcaccgatggcagcgtcagggtcagaataaacggcaggatgaggaccgcggtcgagaactgctcgctaaaccagtccgccagttgcggaataaaagtcgcccgttcaacatcaaccgagcccaacgcgccaaccgccgcgcacaccaacgccgccagcaggcaataacaaaaaagattcagagcgttaattggccccggcatcgaatcggcacgccgcttatcccacagcaccagttgcgccagaatgacgatgaagacgatattggagaagttaatcagcagcgacgcaaaacccatgccccaacgggaagtcaggccgtcataaaccagcatcgcggcaaaacaaatagcgtaaaaatagctgcgatttagccagacgtagcgtgcgaaaatacctgccataacggcgttgagcggccaaaagaacgagagctcctgcaccagacgcaacatagcgcccataaagtgcagcaggatcgtcagcgtgaataacaccagcgcatcgcgcaccggttgatcctcgcgaaatagcgtgaatgaccgaatcgacagtgaagacattcagtaattatccgtctaattgtttcaggcaattattatgtaaataattagttagcggattatcatagcatgagaatatttgttaggcatactgccatgcctgagcgttatcggttaacggttggtaatcgcgttcatttccatcaccagccagtggtgaatcacctgtacgacgtaacgctgctcctcgccgctcagttcacgcccgcgcgggatcgcatgccacttttccagacatccgcggcagcaggtcgccgtagcgtgctgggcgataaataccgggtgcccgcgcatcggcgtctgcttgccgtcattagcaatctgcgccggggccagccgtttggcgataaaatccgccgcgtggctgtcgataatctctggccctttatcataacaatactgccgctctttcaccccgaggtggaagcgagagcggaatgttgaacgcccaagccgggcgaacagattttccattgcagacatcagaacaccgatcttcctaaacgttgggtgagtttttccagtaaggcgatccccgccagcgagttacccgcttcatcaagttcaggactccacaccgcaatcgccatctcctgcggcacgatcgccacaatgccgccgccgacgccggattttgccggcagcccgacacgccaggcgaactcgccggcgttctggtacatgccgctggtcatcatcagcgcgttaacctgtcgcgactgaatcggtgcgatgaccgggtccgccagatgcggggcaatcccccgatcggcgagaaacaggaaggtccgcgccagctcaacgcagctcatctccagcgagcagtagtggaaatagttttgcagcaccgtggcgacatcattatggaaattgccgaaggatttcatcagccaggcgatggcggcgttacgcgcggagtgttcgaactcggagcgtgcgaccaccgaatcataggcgatatcgtccaccccgctcagccgacgcacgatctccagcattctctgacgcggcgcgctcaggcggctttgcagcatgtcgcagaccaccaacgccccagcgttgataaaaggattacgcggtttgccctgctcgatctccagctgcagtaaagagttaaagggctggccggaaggatctttaccgacgcgctgccagatctcctcttcctgataatggttcatcgccaccaccagactgagcaccttcgagatagattgaatcgagaaacgttcgtgggcatcgccggcgctatagtgctggccgtcaaccgtacagatggcgacgcccagtttattgccgctaacgcgcgccagggctggaatgtagtccgctaccttgccgcgccctatcagcggcctgatttctgccagaacggcatccagcattgcattattaataaccgtcgccacactcggctccttgcccaccatcgaaattcgggtggcgagtatagcagagcgcggcgacggacgtcaggcgctaacgtcgattagcgacggtctttccatacggtttgaatattgcagaactcatgcaagccaaaatgcgacagttcccgaccaaagccgcttttcttcacgccgccgaacgccacgcgagcatcgctggcgctatagccattgataaacaccccgccgcactccagaccacgcgcaaaacgctccgcttccgcgctgcttgacgtaaagacggttgccgaaaggccaaactcgctatcgttagccagttcaagggcatgggccgcgtcgcgggcttcgctgatggtagccaccggcccgaaaagctcctgacggaaaccggtcatctccggggtcacgttggccagtaccgtaggcgcgtagtagttgccggcgccagcgattttctcgccgccaagcaataacgtcgccccttccttcagcgtggcttcaacctgttgatgcagttcatcgcgcaaatcaaaacgcgccatcgggccgatgtaattttgctcgtcgcgcgggtcgcccattttcagcgctgccaccgcggccacgaattttttagtaaaagcgtcggcgatacccgcctcaacgataaagcgtttcgacgccgcgcagacctgcccgctgttctgataacggccgacaacggcggctttcaccgcttcgtccagatcggcatcgttaagcacgatgaagggatcggaaccaccgagttccagcacgcattttttcagcgctgcgccggcctgagcgccgattgcccgcccggcgcgtacgctaccggtcaccgtgaccgccgcgatacgatcatcattgataatttgcgagacgccttcattggtggcgttgatccagccaaagacgccagccggcagacccgctttggcaaacagttcgcccagcagctgcgcgctgcccatcacgttcggcgcgtgtttcagcagatagctattcccagccagcagaatcggtaccgcgccgcgcagaacctgccagaccgggaagttccacggcatcaccgccagaatcggccccagcggccggtattcaatcaccgccttattatcttctacctgggtggcttcggtcgccagcatcgccgggccatgttcggcataccagtcgcagagattagccgatttgctcacttcgccgcgtgcctgggcgatgggcttacccatttcaaggctgatcatttgcgccagttcttcaccgcgggcgcgcattgcgccgccgactttacgcagcgcggcggcgcgatcggcgaccgttacctggcgccactggcgaaaaccctgttgcgccagggcaatggctgaatccacttgttgttcggttgaccacggcagagacgacacgacttcaccagtggtcgggttcacggaaaccgcgtgggtggcagataaattcatggttattctctctgtagggattgcgaagtgtggatagtgtggcctactcttcctttcattgaaaatgaataatattaagcaatacattcacaaaagaagaatgctatggaccttacccaacttgagatgtttaacgccgtcgccagtaccggcagtattacccaggccgcgcagaaggtgcaccgcgtcccgtcgaatctgaccacccgcattcgccagctggaggccgacctcggcgtcgagctatttattcgcgagaaccaacggctgcgtctgtcgcccgccgggcacagttttttacgctacagccagcaaatcctggcgttagtcgatgaagcgcggatggtggtcgccggcgatgagccgcaggggctgttttccctcggctcgctggaaagtaccgctgcggtgcgcatccccaccacgttagcccttttcaaccagcgttacccgaagatccacctggcgttgtccaccggcccttccggcaccatgattgacggcgtactggaaggcacgctcagcgcggcgtttgtcgacggtccgctggttcatcccggtctggaggggctaccggtgttcccggaagagatgatgatcgtcgccccttatggccatgcgccggtaacccgcgccagcgaggtcaacggcgcgaatgtctacgcatttcgcgccaactgctcctaccgccgtcattttgagagttggtttcacgccgaccgagcgacgcccggaaggatccatgagatggagtcctaccacggtatgttagcctgcgtaatcgccggcgctgggctggcgctgatcccacgcagtatgctggagagtatgccaggccatcagcaggtttccgcctggccgctcgccgaagagtggcgctggctgacgacctggcttgtgtggcgacgcggcgcgaagacgcgccagctggaggcatttattgaattgctgaacgaggaccgtcaggcggcaagcgcgacatgatggccggacgttaatcggcgataatcagccgcggcgagagttcctggagcgcatcacgggtctcccctggcaaatgcgcatcggtgatgatgtccgtgagtgagtcgaggtgcgcgatattgaacagcgaccaggcgccgtatttcgaactgtcggccagcaggatccgccgccgggcgttggcgatcagatcgcgcttcagcgccgccttctcttccgtcggcgcggtaatgcccttttgcaaatcccaaccgttacagctgacgaatgccagatccggccacacattctgcagcaagcgtcgcccatgctcaccaatacacgactggctgctgtcatcgatgcgcccgccgataatcgtcacctcaatctgtttgaattcagccagaaacagcgcgatatgcagatcgctggtgatgacccgcagcggcagatgcgtaatctgtcgcgccagttcaatcatggtggtaccggcgtccagcacaatggcatcgccagccttgataagcgacgccgccgccctggcgatggcgtacttttcctgtgggctacgctgcgctttttccagcgtcgtcggttgcgtgggaataaatcggttgagcgtcacgcccccgtgggtacggctaatgaccccttcctgatcgagtttaatcagatcgcgacggatggtcgccggcgaggcgttagttaccgcaaccagttggtcgaccgttaccagattatggcttttcaggaagtccataatctgctctaaccgattatatcccttcatgttattcctgtgcgatttgcatggcgagctcaatggaggttgccatgctctcagacttcgctttacctgtccaggcaatatcaaaggcggtgccgtggtccgcggaagtgcggataaacggcaacccggcggtgatattcaccccatcataaaatccaagcaacttgagcggaatatgcccctgatcgtgatacatcgccaccaccatatcgtacatgccttcgtgacactgcatgaagacggtgtccggcgggcacggtccgacaacatggataccctgcgcctccatggcggcaaccgctggggcgacgatacggatttcttcatcgccgaacagaccgttttcaccggcgtgcgggttcactccggctaccgcgatgcgcggctgcgtataccccacgcggcgtaaaaaatcatcggcaacccggataaccgtctccacccgcgattggcttagggtatcgaggaaacgccgcagcgcgatatgggtggtgacgtggatcaccttaagcttatcggtgtacagaaccatggcataatctttggtctgcgtcagatgggccagcagttcggtgtgtccagggaaatggtgcccggccagatgtaacgcctctttattcaacggcgcggtggcgatagctttgacttcgccagccagcgccagcgcggtggcgcgcttgatgcagcgatacgccaaatcgccggcctgagcctggacttcgccgggccgcagcgcctgagggtcgcttaacggttcatcaatcacgttaatcgtcgcgggtgaacactgcgcttcacgcgggtgttcaataatccgcaactccgcacgcggggtaatgttcagcgccaggattcgccgcagcgtctgcgcgcagcccacgaccaccaccggcgctccgctcagttcgccttcgctcagcgatttaataataatttccggaccaatgcccgccgggtcgcccatcgttaccgcaatcatgttagacactcagtttctcctcaataaaattcacgacatcccgcagcgtggtctccgtaccgaatccacctgctttggtcatcaccggacgcggccagcgacttccgagaaaatggccgtacggcacgcattgcgccatccggccggttatatgaaacccctgcgcgccgagcgcatgagcgacggcgatagcgacatcgccgccggacagataaagcgccccgggcgcacgtaactcaacggcaagttgggtgacctgcgcgagataagcgcagatccgttctcccagcgcagcgcggctcaccccgcgttcacggcactgcgcctcaataccgtgccgggcagcgctgtccgcgcaggtggtaaccacgcaatgatgatttgccgccagcaccgcggcgattctccgggcatcggccagggcgtcgccgttaaaggcgcgggcggcatcaatcccgatccgctcgacccgcggatgaccggccaaagcggcgacctgagcctgtgctatttcgctcatggagccgaccaccgccagcaacggcccggccgcatcccggcgcagatagcgcgccagcgcctcgcagatccccgcagagcccaccagcagcgtttgccgcgcgcggctggctaccgcggcgataacctcatccagctgctcgtcttcttcggcatcaataatcaacactcgtggttggtcgctctcttccgcaagggcggctgccagctgtcgcacgtcaagcgaacggcacggcagttggctctgcatagcgagcaattgcccaatatcggcgctagtgaccggggttttggggtcgctggcgaattctgtttcattaagcgctacgccgtggacataacagcgccccccgcgggttatacgccctgcacccggaaaggcaggcgcgacaaccgcgacagagcagctccgcgcacgcatcatcgcctccagctccgcgccgggattgccgcgcagggtggaatcgattttcttcacctgccagacggcggcgaaatttgccgcatcacggagcactgtgttcactttctctgcagcctgcgccccggaaagcgcccgactatcgctattgagaaccaatgcccgggtggtcggctgatggccagcgttaaacgccacctcaaccgccaggcccgcttccgccagactgacaccggcatcattggccccggtaaagtcatctgccagcaccagaacaggattatcgccgcagctcattctctttccttcatcgcttatctgaaccgctaatgattatattcaatcatatttgattaaatgtgagcaagctcaagttattaaacgtccgtataaattataacttttgctcattgaaatgagtgaacactaagcatgatgattgaattcaatcataacaatagaggagtgagacgtggcgacgattaacagtacgattatcagcggcgcgggcgccatatcagccctgaagccagtgctggcaggtaaaaaaagcattctgctggttaccgatgcgaatgtcggtaagctggaagcgaccaaacagatccaacacctgatgggcgagaataacgttgaggtgaggatcgtggattccgtaccggcagagcccagccaacatgacgtggcgcaaattgttgcccaactcgcgggagcgcaaccggagatggtcgtcggtatcggcggcggcagcgtcctcgacgtggcgaagctgctctcggtattacttcatcccgcctcccctgcgctcaacgcgctgatcgacggcgagaaaccgcgcctgcgtctggcatcgctgctgatacccgccaccgcaggcaccggctcggaagcgacaccaaacgccatcctggctattcccgaacgtaataccaaagtggggattatctccccggtactgctgcctgatttcgtggctctgttgccggaactgaccaccagcatgcctgcggccattgccgcctccaccggaatcgatgcgctgtgtcatctcctggaatgctttacttccaccgtcgcgaacctggtgagcgataacgccgccttaatcggcctgtataagctggtacggcatattgagcgttccgtgacccacccgcaggatcttacggcgaaactggagatgttgtgggcctcgtactacggcggcgtggctatcaatcatgccggtacgcatctggtgcatgcgctctcctacccgcttggcggcacctggcatttaccacacggcgtcgcgaacgccattctgttggccccctgtatgcaggtcgtacgcccgcacgcggtggataaattcgcccaggtctgggatctgatcccggacgccgatctgactttgaataacgaagagaaatctcatgcgctggtctgctggctggcgcaactggtgaaacgcctggcgctgcccgacaacctcgccgcgctgggcgtaccaccagagagtattgaaacgctgagcgccgcggcgctggaagtaaaacgattaatgaacaatgccccatgcagcgtgaaccaggacgaagtccaggcgatttaccagacgctgtttccacagtcatctcatcagggagaagagaaataaatgcatcattccattcgcggcgtgttaaccgccattgttaccccctttaccgccagcggtgaacttaatttgacggcgctgcgccaacaggtagaacgacagctggccgccggtaatggcattttttgcggcggaaccaacggcgagtttttcgtcctcaatgaagcggaaaaaatagctgttgccgaaacctgcgtcgaggcggttgccggacgcgcgccggtggtggcgcatattggcgaagtgtcgacgcgggaaaccattcgtcttggccagcagatagcaaagtcaggcgtcgacgcggtgtccgtcatcaccccgtggttcgtgccgctaaaacaggatgagctggtaagccactacacggcaatcgctgatgcgctaagcgtaccggtatttctgtataacatcccggcgcgcaccggtaacaccattgaaccgcaaaccgcacgtcagctggctgcgcatggcaacatcattggcatcaaagatagcgccggtagttatgagagtcttaagggctttcttgatgcggtgaaagatatcgacggttttaatgttctgaacgggccggattcgctgattcatcagggtttcgttgacggttgttcagcgtgcatttccgggctggctaacgtggcgccacgggagattaacgcgatttggtcaaccttccaggcaggcgatattgcggcctcaaggctggcgcaggaaaacgtcaccggcctgcgtaccgatctctacaaagtcgccttttcccccgccgcggtgaaaaaagcattgcagctgatgggccatgaggttggcgatagccgctacgcggtgcagtttagcgcatctcaactgcagcaaatacgtggaatcatcgcgcagtatcttaattaagcgctgcgcttcttcaacaaaatagaccgggcacctgcgtgcccaggattcgtacgcccaaagagaggctaagatgaatcattttaccactgaagatacctttattattgttggcattgtcatcgcctatatcttatttaccacctggctgacgttccgtattagaagtaaaaactccggggattttatggagggctcgcgcgcgatgccggcctttattgtcggtatcctgctgatgtcggaatatatcggcgccaagtccactatcggaaccgcacaggccgcgtttgagagcgggattgccgcctcctggtcggtgctgggcgccgccattggctttccactatttggcctgatactggttaagcgcatctataacactggcaaaattactatttccggggcgattgccgagaaatacggcaccagcaccaagaatattatttccattattatgatttacgccctgttgctggtgaacgtcggtaactacgtcagcggcgcggcggccatttccacggtattaaagatcaatttacccttcgcggcgtttattaccgccatcgtcagtactttctattttgcctttggcggtatgaaaggcgtggcctgggtaaccatgctgcacagcgctttaaaatatgccggcctgcttattattatgggtttcgcgctggcaaaaaccggcggttttacgccgatgatcgagaaaatgccagattactactggacctgggatggtaatatcggcgccggcacgatctgcgcctggcttatcggcaccatcggctccatcttctgtacccagtttgtcattcaggccatcagctcgacaaaaaacgtaaaatcggcgaaacgctctacctggattgcctttttcttctgcctgcctatcgccttcgcgatcgccattatcggcgtggcggcgaagtttttacacccggaaatcaacagcctgtacgccctgccggtgttcctgcaggatatgaacccgtggcttgccgggttagtgacaacgtcacttgtagcttcaattttcgttagcgtcagtaccgttgccctggcgattgcctcgctggtggtaaaagatttttacgtgccgtggcgcaatccaacgccggagcaggagtttaaagccacccgttgggcctcgctgatcatcggttttctgccgcttatttttgtgctgctggtaccggaagtgctgaagctctccttctttacccgcgccatcaggctctctatcaccgtcgtcgcggtcatcgccttctatgcgccgttctttaagagcgcccgcggcgcgaacgctggccttatcggcgcctgcgtggtgacttcggcgtggtatttgctcggcgatccgttcggcatcaataacatgtacatcgcgctgatcaccccggccctgattatggtgatcgaccgcctgatccccaataaagcgcaacaatcatccccggcccccattgaacaacgtggagtgtaaaaatgaccaccaccccaacttttgacggcgtaattcgccaacaccaacaggatcctcatctggcatgggcaatgttgccctccggctgcccgcaaaaccatgccgccaatcttttgccgctgcccgatggcacgctgctgtgcgtgtggtttggcggttcgcaggaaggaaaagcggatatttcagtctggggggcgcgtttagcgccgggcgccgcatcgtggagtgaagcgacaaagttgtccgacgatccgcagcgttcggaacaaaacccggtactgtttcaggctccagatggcgtgctgtggctgttatggaccgcgcagcacgccggcaatcaggacaccgctattgtgcgttatcgccagtcgcgcgatggcggaaaacactggggagcaatcgccaccctgctcgatgaacccggcacctttattcggcaacccatcagcgtgatgcccaacggtaactggttgctgccggttttctattgtcgtacccggccgggggagaaatgggtcggtaacgatgatgtgagcgcggtaaaaatctcagccgatggcggcaagagctggcgcgacgtggcggtaccgcagagcctcggctgcgtgcatatgaatatcaccccgctggccgatggctcgctggccgccttcttccgcagccgctgggccgatcatatctggtacagccggtcgacagattttggcgaaagctggtcagcgccgatccccaccacgctgccaaacaataactcgtccattcaggttaccacgttgagtaacggcgatctggcgctggtgttcaataacatgagcgcagcaggcgccagcgagcgtcgggcatcgttatacgatgaaatagaagatgatgacggtcgtaaagagcctgaacgcactggcaaaaccgccttctggggcgcgccgcgtgcgccaatgaccgtggcgatttccgctgacggcggtaaaagctggccatggatgcgcaaccttgatgagggcgacggctactgtatgaccaacaattccgaacaaaaactgaaccgcgaattctcctaccccagtattaaacagggtgaagacggtaatttacagattgcctatacctggtaccgacaggccatcaagtatgtccgcgtctcgccgcagtgggttaaaggagaaatcgcatgatcattggtaatctgaacgccctgcctcaggcggggttgccgctggcgttacgacaaatcctcagccgtcctgaatgttctcttgccgccctgacagcccgtgaagatggtcgctttcaacctgctgatagcgactggtactgcaccatcggcaccgcgcaaacccaggcggcagaacagcgacataccgaataccaccaccagtgggccgatattcaggtcattttaagcggaaaggagactattcatgccagtacgctttacagcggccaacccgacgatgaacaacgcaaaccagatctctttatcagccagcagacgccgcaaagcgtcacgctgcatttgcatgccggcgacttcgcggtctttctgcccggcgaaccacaccaggcgctgtgcgcctttgcaacacccgccccggtgaggaaagcggtatttaaagtaccgcgcagcatgctggaggcgccatgaagcaggcactggtcacaggcgccagttcggggatcggcgcggcgattgtggggcaactgctggcggagggctggcaggtgctcgggctaagccgctccgcgccgccgttcgctcgtgaagccttcaggcatctggcggtcgatgtgagcgaccgccaggcgctggttgatgctctgtcgtcggtaccgacgccgcaggcgattatccatgccgccggtatgatggcggcggcgccgctaggagaacttgacgcactgcgtggccagacgttatggcgtctgcatgtggatgcagcgcagatcttagccaaccgctttgcgcccgttatgagccgcggcggtcggattatccttttgggtagccgaacctctcgcggagcggcaggccgttctcagtatacggcaaccaaagcggcgctggtggcgctggcgagaagctgggcggcggaacttgccgcggcgggcattaccgttaacgtggtcgcccccggcgccaccgatacgccaatgctgcgccagccagggcgggagagttcgccgccgaagacgccgccgctcggtagattgattaagccacaggaagtggtgtcgctggtgagctggcttcttagcgaagaggccgcggccatgaccggacaagagctggtaatgtgcggcggcgcctcgcttagttaggattgcccggctaagcgctgcgtcagccggggaaactatcgttaactttcgcgcaaatagaccgtgccgcgcagataggtggtcgcctggccgctaatcaatacgcggtcatcgcgccactggcagcgcagctcgccgctgcgcgccgacacctggcgcgccagcaggtcggttttattgagcttcgctccccagtaggggatcagcatactgtgggttgaaccggttaccggatcctccggcaccccatcaccgggacagaaaaagcggctgacaaaatcgtactcctcgtcggcggcgctgatgcaaatccgcttatccagcgtctccagcagcgccatattcggacgtaccgcttcaacctgcgcccggtcgcgtagcaccaccaggtaatcacgcccttcccgcacctccagcgcatcatcgatacccaacccggcgaacagtgccggcggtacgtcatgcaccggcgtcgtttgccaggccgggaaatccagcgtcagccaatcgccgctgcgcgtcacccgcagctcaccgacaaaacgggtgctgaatacgatagttgccgaagggtgatcgagatattcaaaaatcacgtgcgatgctgcgagggtggcgtgaccgcagagattaatctcatcaagggtcgtgaaccagcgcagctcatagccgctgtcggtacgaacaaaaaacgccgtttcggattgattatgctgctgcgccatttttaaaagcgtttcatcaggcagccattcgctgagcgggcacaccgccgccgcgttgccgccaaaattgcgatcgctgaaggcatcgaccaggtaaaaactaatttctttcatcgtgctccccttttttatcgtctatcaacatgacacagaaagcgcgggtgcacactattagctgaaaaattaagttgttagcaggcacaggtgtcagcataaaatgagacacagatcacaaagtgattgtattttcagcagcattcgttttaagatcgccttctcttcttctcattactaccagcccggaatttatgcttacaaatacggtctcacgcagagtcgcgtggctgcgggtcgtcacgctggcaattgccgcctttatctttaataccacggaatttgctccggtcggtttgctgtctgatatcgccgacagcttcggcatggaaacggcccaggtcgggatcatgctgaccatttatgcctgggtagtggcattgatgtcgctgccgttcatgctgctgaccagccagatggagcgccgtcgcctgctcattggcctgttcgtcttatttatcgccagccacgtattgtcatttttcgcgtggaacttcacggtgctggtggtgagtcgaattggcattgcgttcgcccatgcggtgttctggtcgatcacttccgcgctggctatccgtatggcccctcccggcaagcgcgcacaggcgctaagtcttatcgccaccggtaccgcactggccatggtgttcggcatccctattggccgtatcgtcggacaatattttggctggcgcaccaccttcctggccattggtcttggcgctttagcgacgctggtgtgcctggctaaactattgccggcgctgccaagcgaacattccggttcgctgaagagcctgccggtgctgttccgccgtccggcgctgctcggcatttatctgctgacggttatcgtggtgaccgcccactacacggcatacagctatattgaacccttcgttcaaaccgtcgctggtcttagcggtaacttcgccaccctactgctgttagtgctcggcggcgcaggtattatcggaagtattatcttcggcaagctgggcaatcaacatgcttcagggctgattaccaccgctatcggcctgttgctaatatgcctgctgttgctgctacccgcctcacggaacgccaaccagctgatgctgctcagcgtgttttgggggatcgcgataatggtcatcggccttggcatgcaggtgaaagtgctggcgctggcttcggatgctaccgatgtcgcgatgtcgctgttttcgggtattttcaatattggtattggcgccggcgcgctggtcggcagccaggtgagtacgcagctgtcgatgtcggcgataggctacgttggcgcagtgccggcgctggtggcgctggtctgggcagtgatgatttttcgccgctggccaacgccgcttgatgaacagcaagcgcatcactcatgataacgacgcgggcggtcaatgccgcccgcggcgccgacatcctatccccaaaaggcccgaaacagacacgtcgccgggcctttcagaaagttatcgcgatcaggcgtgatagttggtgataatctccagcacgccgttaatgatgaactgaacccccatacagaccagcaggaaacccatcaggcgggaaatcgcttctatgccgcctttccccaccagccgcatgattgccccggaacttcgcaggcagccccacagaatgatccccaccagcgcgaagataatcggcggcgccgccaatactacccaatcagggaaatcgacgccgtgcttcaccgtcgaggcggagctgataatcatcgcaatggtgcccggcccggcggtgctaggcatcgccaacggcacgaaggcgatattcgccgtgggttcatcctgcagttcttccgatttgatcttcgcttccatcgaatcatgggctttctgctgcggaaacagcatacgaaaaccgataaaagccacgatcagcccgccggcgatacgcagaccgggaatggaaataccgaaggtattcatgaccacctggccggcataccacgccaccatcaggatcgcgaagacatacaccgatgccatcaacgattgccggttacgctcggcgttgttcatattgcccgccagaccaaggaacaatgccacggtggtgagcgggttcgccagcggtaaaatcaccgccagaccgatccctattgctttaaagagttccagcatagtgagtcaacatcccgttaagtatcattttttcagtacagtttcaccccgtgagtatatcgacagcagcagcgcagatgccacaccccatgaaaaaatcacgcttataaaaaataacaagcgttagtaaaatggaaaaaagtgaccaccatcaaattatcgttctttagcaaatcgtggcatcggcgaattcataatgttgacttatgattgccacggcaataatatccatcgcaactaaataattgcctgggcaactatcatggaaaacaccaacaatctgttcaacgagatgatccctctcggccgattgatccagatggttaaccagaaaaaagatcgactgctcaacgactacctttcacccatggatatcaccgctacccaatttcgggtgctctgttccattcgctgcgaggtatgtacgacacccgttgagctgaagaccgttctgtcggtcgatccaggcgcaatgacgcgcatgctcgacagactcgtctgcaaaggctggatagaacggttgcccaaccccaatgacaagcgcggcattctggtgcaactgactccagaaggcgcagccctttgtgagcactgtcatcaggttgtgggtcaaaaattgcaccaggaactaacaaaaaatctaacggcagacgaagtggtcatgcttgagcaactgctcaagaaagtcctgccgtaataagaagaggtaagatgatgtccagacgcaataacgacgccatcactatccatagtattttgtcgtggatcgaagagaacctggaatctccattgtcgctggagaaagtttcggagcgctcaggttactccaaatggcacctgcaaagaatgttcaagaaagagaccggccactcgctgggccagtacatccgcagtcgtaagctgacggagattgcgcaaaaactcaagcagagcaacgagccaattttgtatctggctgaacgttacggttttgaatcgcaacagacgctgacgcgaacgtttaaaaactacttcgatgttccgccgcacaaatatcgcatcaccaacgttccgggagaatcccgctacctgatgccgctaaataattattgttgttaatcgcctgcataaagacgtatcgaggaaatcatgaaattattcgctaccgccgccatcgtgctaatggcgctggctgcaggccagagttacgcggagcaaaccaccactccggttcgccacaataaccgggatgcgatgattattccttcggaacataacgactcgccgtttgattttaatcacatggctgccggcaatgataaatcggatgagctgggcgtaccgtattacaactaatgctccacttgttctgatatctcctgggccccgctaacgcggggcttttttatcccgcgccgcgcccgggtgcaccagccgcagaccaaacacgttaatgtagagcccgcccataatcagcgccgcccccaacagctgcaggccattgagccgttcaccgagtagcagagccgcgctggccatcccgaccaccggcaccaacagcgacaacggcgccaccctccaggtttcataacgtcccagcagcgctccccagataccgtaaccaacaatagtggcgacaaacgccagatacatgagcgatagcacggtcgtggcgtcgatattcaccaggcttgccgccatcgcctgcggcccatcaacaatacccgacgccagcataaacggtaaaaccggaatcaacgcgctccacaccaccagcgacataatcggcggcctgtgctgctgagacataatcttcttgttgaaaatgttaccgcaggcccagctaaacgccgccgccagagtcagcataaaaccgaccagcggcacgtgctggccaccgaggctggcctcaaccagtaccaatacgccaaaaatcgccagcgcgataccggcaacctgctttccctgtaaccgctcgccaaagacaaaagcgcccagcacgattgtgaaaaaggcctgcgcctgcagcaccagagaagccagcccggccggcataccgaggttaatcgcgcagaataaaaaggcgaactggccgaaactgatggtcaggccgtagcccagcatcagacgcagcggtattttgggccgcgcaacgaacagcagcgccggaaacgccaccagcaaaaaacgtaaccccgccagcatcagcggcggcatattgtgtaacccgagcttaatcaccacaaagttaagcccccacaccaccactaccagcattgccagcagtccatctctgcgcgtcatacgaagcccctgtcttcctggtcaacgatgaccaccgtcaaagtaaccaaattcccgccgctcgaacagatcattatttttagcaggtgctgaaggcactttccgacacggagcccgctatacaaggctcagttagcatgctatttgtgatcgggcacaacaaaaataaaacacttcatcgggcaaggaaaaaatgacaaccaccatcaggcgctcaacggtagcgctgttggcgtcgtcgttgctgttaaccatcggccgcggcgcaacgcttccttttatgacgatttatctcacccgtcggttccagctggaagtcgatgtcattggctatgcgctctccgtcgcgctggtcgtcggcgttatcttcagcatgggcttcggtattcttgccgataaattcgacaaaaaactctatatgctgatcgccatcgtggcgtttatcgtgggctttatcgccatccccgcggtcaatagcgtggcgctggtggtgttctttttctcattgatcaactgcgcctattcggttttctccacggtactgaaagcctggtttgccgacgtgctgacgccggagaaaaaagcgcgcatcttttcgctcaactataccttcctcaatatcggctggaccgttgggccgccaataggcaccctgctggtaatgcagagtattaacctgcctttctggctggccgcgctgtgcgccgccttcccgctggtgtttattcagctcttcgtcgagcgcacctctgccgccagtgcggaaggcatcacgccgcagtggacgccgtcggtgcttttgcgcgaccgcgccttgctgtggtttaccttttccggcttgctggcgtcatttgtcggcggctctttcgcctcctgcatttcgcagtatgtgctggccgcaggcaccagcgacttcgcggaaaaagtggtcgcggtagtgctgccggtcaacgccgcggtggtcgtcgcgttgcaatatgccgtcgggcgacggctttcggcgcgaaacatccgcccgctaatgaccttcggcaccctgtgctatgtgttgggtctcggcgggtttatcctctccggtaataatctgctgatgtggggcatttccgccgccatctttacccttggcgaaattatttatgcgccgggcgaatatatgctgatcgatcagattgccccacccggtatgaaagccagctacttttccgcccagtcgttaggctggttaggcgcggcgttcaatccgatgctaaccgggataatcctcacccatctgccgcactggtcgctattcttcattttaatgctggcgatagtcgccgcctggctgatgattttccgcggcatgaacgtgcgtccgtggcaaaccgtacaggcgtaaaccgcgcgtcatgcggctgtcgggttgctgtcgtctgtctgtcgggtgcctgtcgtggcgcccggcaggctaaaaaaccacactggtctcaggttcccatccggagattaacatcatgaacagcagtacccgcgtcaaacaattacgtctgcagcgcgcctggtcccaggaacagcttgccgaactggctggcgtcagcgttcgcactatccagaggatcgaaaacggcgatcgcccggggttagaaaccctgagcgccctggcggcagtgtttgagataaatgtggccgaactcagcgacgatgcgcctgtcggtcacgaagcgtcgctcgatttacggatcgaagaagcgaaaagccgcctgcatcaggagagccgttttttccgctcgctaagcgtggcggtcacggtttgcgttttgttgctggtgattaatcatttcacccaaccggatgtctactggtcagtgtgggtggcgatcgtctggggtgcattattgctactacggggattacgtctgtttgtctttgccgggtggatccgccactggcgacaggcacgcctacagcgcctgctgcgcaaatagaaaaagcccgcttaatgcgggctatctctttaccagacctgggcggcgatccctgtgaccagccgcactttatcccactgctgggcttcgcttaacgaattgccctcttcggtggaggcaaagccgcactgcgggctcaggcaaatctgctccagcggcacatactgcgccgcctcctgcaggcgcgccttcacgccttccgggttttccagttcaccattcttggtggtaatcagccccagaaccacctgctgatggcctggtcggataaagcgcagcggggcaaaatcaccggaacggtcattatcatattcgaggaagaacgcatcgatgttgacgccgccgaagagaatttccgccacgggctcgtagccgccttctgaaatccaggtcgaacggaagttaccgcgacagacgtgcagaccaacggtcagatcctgcggtttcccttccagcgctttattcagcacccgggcataggtacgcgccagttcgtccggatcgtcaccgcgctcgcgtacctgctggcgttgttcgtctgaacataaataggcccagacggtgtcatcgagttgcagataacggcagccagcgtcatagaaagcgcggatcgcgtcacgccaggtggttgctagatcgtcaaagtattcggccaggtccgggtatacggtgctatcgatatctttacgcccgccgcggaagtgcagcacgctggggctggggatggtcattttcggctgcgcattgccgctgacgcttttcaaaaagcggaaatcttccagcattggatggttgccgaagcccagtttaccggtcacgcgcacgccgtgcgctttagtctgcacgccgttgaactgaatacctttctctgaatcgtaacgttccacgccttccagaccgtcgaagaagtcgaagtgccaccatgcgcgccggaactcaccgtcggtcaccacgtgcaggccgcaatcgcactgctgctgaaccagttggcggatggcttcattctcaatttcacgcagatggccggcatcaatattgccttccgccagctgcaggcgcgcctgcttaatggcgttaggacgtaaaaaactgccgacaatatctgcgcggaacggggcctggtgacgttgcatgttctctccttaacggcaggcaggtagttgcccgccgtgataattcattatttgaatttttagacttctggatgtctatatgtccggatactgtcatgcggagagagcatcggcaaacgagaaaaattcatggctgttgaatttatttcatgttgctcgcttcgctgacgctaaatgcgaacccctcatccgcccaaccggtcaggccgccgagcatcatttttaccggtctgccaagctgcgccagctttaaggcggcaatatccgcgccgttgcagtgcggcccggcgcaatagacaacaaacagcgtttccgcgggccactgcgccattcgcgcggcattgatctcgcgatgcggcagatgcagcgcaccaggcaggtggcgacgggcaaacacatcatgactgccaatcacgtgcagtagcacaaagtcctgttcgccgtgctgcatggcgtgatggacatccgcgcagtcggtttcgaaactcagtttatgggcaaaccaggcagcggcatcgaccggggcggctggtgtaaattggcttacaacactcatggcgtattctccttgtctgtggttacactactttaaccaccaccgtacccggaccaccgcccccattgatgacagaaaacgctgaaatcctgacaacccgcaatgtgacactgtcaccaccaaaagtcgtcgttctggcctatgacggcctgtgtacctttgaattcggcgtggcggtggagatttttggcctcccgcgcccggaaatgggggaaagctggtatcggttcgcggtcgccgccgtcgatgatggcgagcttcgcgccaccggcggtatccgtatcgtcagcgatggcgggctggcgctgcttgatgaagcggacaccatcgtggtgcccggctggcgtggcatagaaagcgatgttcctcaagcgttgtgccaggcgctggcggctgcgtacgcgcgcggctgcagaatcgtttctatctgttccggggtgtttgtgctcgccgccgccggattgctcaatgggcggcaggccaccacccattggcgttatactgcccggctgcagcagcgttttccgttgattgaggtggtggaagacgtgctgtacgttggcgatgcgcggctgatgacctctgccggcagcgccgcgggtatcgatctctgtctgcatctggtgcgcgaagatttcggccatgaagcggcgaatatcgtcgcccggcggctggtggtgtcgccgcaccgtgacggtgggcaggcgcagcaggtgattcgcccggtggctacagcgcgtgaaagccagcgcctcgggcagctgtttgattacctgcatcagcatctcgctgagagccataccctcgcctcgctggcgcaacggatggatatgagcccgcgcactttcttgcgccgttttcaacaggcgaccggcaaatcaccggcccgctggctgctcgatgagcggttgcttcgcgcccgccagcagctcaccgacagccgcctcagcatcgacagaatcgccgaaatctgcggtttcgctaatgccagtacgctacgtcatcactttcgccagcatttcgccgtgagcccgctgcaatatcgaaaaaagttttccaccggtcagcggtaatattaagatggccagcgacaataattcgcgtcgttgatttacacctgcaaggattaagctgatgaaaaaagagtgtcgcgtcgttatctataaagaggggctgctgggcagtatgttttttggcgaagcgaaagccgaccccgataaaatgagccggttcctcactgagtacacgcagcagggctgggaagtcaaaaccatggcagtcgaacgccgccgcagcgcactgttctggtcgcgcgaagcgtatttatttgtgcttgaacgcgccatctgatgcgttaatttatttcatataccctaacgccattctggttaatcgtttgtttagattgaccaggatattatctattcaacaaccgtaaaccctgttcaatgaggacaacattagcgcataaataagatggaggtaaaccatgctgggaaacatgcatgtttttatggccgtactgggaacaatcctgttctttggttttctggccgcgtatctaagccacaaatgggatgactgatgaacgacgataatcccccccgtaagcgccccctgctgctgttgcaccagggggcgttctgttttaagtccttctttgaacgcctgccacatcatccccaccgcctgtttactgccgcttataaggtctttctacgcttgcgcgaatacatcacttcatcgctttgttttagcatatccccgagcatcggataacggctgacatcgctctgtagctcgccgtaagagtaattaatgttatagggttttcctgacgtctggttgtaatgatcgacactctcacgcagcttttgcaagaatgtgtcggcacgcccgttgcgggtaatgatgacgacgaactcatcgccgcctaaacggccgacaacctcgcctggcagtagatgttgcgccagaaacgccgcgaaggtttttagcacctcgtcaccttccgcatgcccccacagatcgttaatgggtttgaatttatcgagatcaaaaaagaccaggctaaacggggttgcattgctggtaagcgtacggaaacgtttatcgccgatgcggtaaaagccgcgccggttagcgatgccggtcagactgtcggtcatcgccatgccaatcacctggaactcatcctcgacgatatacgccagatccttgaggacggcgatctcttcatcgttaaactcgcgcggcgtggtatgaatcaggcatagcgtaccggccacggcgccatcgggcagatggacaggatagcccgcgtagaagcggatatagggttcgcccgtcaccagcgggttatcataaaaacgatcgtcattgaccgcatcgttaacgatgaaggcgccgtcctgcaagatggcgtgggcgcaaaaagagatatcgcgccgggtctggcgaatccccagcccctgacaggcgagcaaccactgccgttcccggtcgagcaggctgataagtaccaccggcacctgaaaaatttttttagccagccgggtgagacgttcgaaacgctcatcatcacgggtatcgagcaggtccgccagatacagcgatttcagtctttcttcttcattttccggtacgccagggaatttcataaagcctcattgcactaaagcgaaaaaatcaggtggcgggattaatgcgcagccgatgaaaagcgcgtcagcgccccataccagtcatagctgccctgggtgccaatttcgcgttccccctcttccagcttcagcagaaaacgtcgtttgttaagctgatcgaggttgtggaagtaagttgccagccgtcgggctaaatcttcatacatggcaaaagccaccgcggtcccttgcgtcgcatcggcatacttcgcaaattcgttcttaatcgcctgaaaatcatcgttcattgaaagcaccacctcctgtcacaatgtcatcagtatggttagccctggccgttttttccatcccgatagctatcagcattttatgctgccttaaaaaatacagccctgggaatctccgagacccacgctatgaaaaacaacgtatttatgctgccatcagcgcaaattatcaacaaccagcagaagataataaaatcgacaagcgacgagaccgggggaatgggcaaaaaaaaaccgccatgtgactggcggtgaataaatgcttgcatggatagatcgtagattgtatttagcgttttcgtagaaaagcgtcgtgagttcctacgtctgactcgcaggctagcacgcccttgttcaataaatcttaaaccgcagacgtactcatagcttctctaccagcgctttgagttcagcgatcagcggcgcggtattgtcctgcgccgcgagcggccacgtcgactggcgtaccaccagccgcgccggcagcagttcgcgcaggcgaccggtcggcgccgccatctgctgcatcagtaattccaccgcccggcggcctaacagatcaaaatcctgggcgacggtggtaagcggcggctgaaagtaaaggctatcggccgtatcgtcatagccggtcaccgaaatcgcctggctgccgcgccgattaagctgcgccagcgcgcttaacaccccgagcgccatctgatcgttggcgaccacgatcgcgcttaatttcgggtttttatgcagcaactcaaaggttttttgccagccgctggcggcgctccagtcgccgaacaccgtaatcgattgactgacccccagccggtgcagcgtctcgcgccagctgccaaggcgcatccgcgccgataccgagctttccggcccggccaacaggccaaactcgcgatgccctaattcccaaagatggcgcacgcaggcgccgcagccatcacgatgatcaaaacgcacgcaggagacatccgtctccggcgagacatcgagaaacaggcaggcgatatccgtattttccgccgccagccgttcggcgacgctgctctccagcggcaggctgataatggcgcctcgaatatgctgggcgcgaaattcatccagccgcgcctgcagtgccgggtaatcactttgcgccggcatggcgatggcgacctccagcccctgctcaccggcataccgtttcaccgccgcggcaatttgcgacggcgcgtgtaaggtcaacgacgccgtgataagccctatcgacgctgccgctttgcccgccaatagctgtgctgaccggttaggtacatagtgcagcgtctgcatcgcgcgcagcaccttttcacgggtgcgctgcgccactatctgtgggttattcaccacccgcgaaaccgtctgctgtgaaacgcccgcctcgcgggcgacatcttctaaagtggctgaacgacgctgcatcgcatactcctgtcagtgaaaatggcttaatgtcttacgctaacattttatgtcttccttacgacagaaatctgctatttgcgccgtgattcgtgatcgtgaatgggtttcattttcgccaacgttgcgggcctgcaaaaaatacccgataacccgatgagattgtttagcgaataacatttattaccattatccgtcaggtatgcgtatgcaacgatatgattcaggcgccgctcgcggccccgcttttcacgaagtcctggcccgcgaggactggcagaaccagactatcacccacctcaaccgcctgcccgcacatcccacttttgccagctggcgcgatgccgatgcggcgcgcgacaaccgccattctgaccgccgtcgtcaactggacggcgaatggcaattttcctatgcccgcagtccgtttcaggtggatgccagctggctgcagcatgacctgcccgacagtcgcccgacgccggtgccctcaaactggcaaatggagggttatgacgcgccgatatacagcaacgtccgctatccgattgataccgtgccgccgcgggtgcccgaagacaatcctaccggctgctattcgctgcagttgaccgtcgatgaggcgtggcgggccgaagggcaaacgcaaattatctttgacggcgtcaactccgcctttcatctgtggtgcaacggcgaatgggttggctactcccaggatagccgcctgcccgccgcctttgatttaagcccgtatctgcagcaaggcgccaaccgcttgtgcgtgatggtgatgcgctggagcgcgggcagttggcttgaagatcaggatatgtggcgcatgagcggtatcttccgttcggtctggttgttgcataaaccgcaggcccgcctcagcgatgtgcaattaaccccgcagctcgatgcgcgctatcgcgatgcgcaattgcaggtcaaacttagcgtcgaggccgcgtctgaagcgctggcggcgctggaagtggaggttgcgctgtgggatggcaaaacgcgccttgccagccagcgccagccgctgggtacgccgattatcgatgaacgcggcagctacggcgagcgggcaatcatcaatctcgacgtcgaacgcccgcgactgtggagcgccgagcaaccacattgttaccgcgcggtggtatcgctatggcgcggcgagacgttgcttgaagcggaaggctgggatattggttttcgccaggtagaaatccgcgacgggctactgttgctcaacggcaagccgctattgattcgcggcgtcaaccgccacgaacatcatcatcagcgcggccaggtggtcaacgaagaggatatggtgcaggacattctgctgatgaagcagaacaatttcaatgccgtgcgctgttcgcactaccccaacgcgccgcgctggtacgagctatgcaaccgctacggcctgtacgtggtggacgaagccaatatcgaaactcacggcatggtgccgatgaatcggctatctgacgatccggcctggcttgccgcttacagcgcgcgcgtcacccgtatggtccagagcaaccgcaaccatccctcgatcattatctggtcgctgggtaatgagtccggctgcggcgacaaccatcaggccatgtaccaatggttgaagcacaacgatccttcgcgtccggtacagtatgaaggcggcggcgccgatagcagcgccaccgatattatctgcccgatgtacgcccgcgtcgagcgcgaccagcccttcccggcggtgcccaaatggtcgatcaaaaagtggatcggtatgcctggcgaacaacgcccgctgatcctctgcgaatacgcccacgcgatgggcaatagcctgggcaatttcgccgattactggcaagccttccgtgactatcctcgcctgcagggcggttttatctgggattgggccgaccaggcaatcgaaaaaacattcccggatggtagcgtcggctgggcctatggcggcgatttcggcgataagcctaacgaccggcagttctgcatgaatggcctggtattccccgaccggcgcgctcatccttcgcttatcgaggccaaacatgcgcaacagtatttccagttcgccttgctggaacaaaatccgctgcgcattgctatcaccagcgaatacctgttccgcgccaccgacaacgaaacgctgcgctggcaggttcagtgcgccggagaaacgatagccagcggcgacttagcgctgacgctgccgccgcaagggcgggcggaattgattcttagcgaaagcctggccctgccgcgcggcgcccgcgatgtctggctgctgctcgaggtgatccagccgcaggcgacgtcatggtctgagcccggtcaccgcgtcgcctggcagcagctagcgcttaccgcgccgctggcgcttgctgagacctccgccgaaggcccggcgccggtcctgaccatcaaacccgcgatctacgaggttagcgtcggatcccagcgctgggttatcgatcgccagagcgggcgtttaagcgaatggtattgcgcgggagaacagcagctgctgaccccgctggaggatcagtttgtccgtgcgccgctggacaatgatatcggcgtcagcgaagtcgaacgtatcgatccgaacgcctgggtcgaacgctggaagagcgccggtctgtattcgttgacgacccgctgcgtgaaatgcgaggcgcaacagctggcacgggaggtgatcgttgatagccactggcactatctgcgcggcgaggagacggtcattgccagccactggcgcatgaccttcaccgccgacggcaagctccagctcaccgttgatggcgaacgtgccgccacgttaccgccgctggcgcgcgtcgggctgcgcttccaggtcgccgaacaacacgctgaggtcagttggttgggattagggccgcacgaaaactatccggatcgcaaaagtagcgcctgtttttcacgctggcgattgccgctgcgcgagatgagcacgccctatatcttccccagcgaaaacggtctgcgctgcgattgcaaagcgctggactggggatgctggcacgtcgcaggccagttccacttttcggtgcagccgtacagcacggaacagctgatgaggaccgatcactggcatcgcatgacgccggaaaaaggcgtctggatcacgctcgacggccagcatatgggcgttggcggcgatgattcctggacaccaagcgttctgccacagtggctgctgctcgaagcccactggcactatcaggttacgcttcattgtcaataataacgggggcctcggcccccaccgcacaggtataataagatatgaaactctctgaactcacgccccgcgaacggcacaattttatctatttcatgctgttctttttcttttactatttcattatgtcggcttactttccatttttcccggtatggctggcggaagtaaaccatttaacgaaaaccgaaacagggattgttttctcctccatttcgctattcgcgatatttttccaaccggtgtttggcctgatttcggataagctcgggctgcgtaaacatctgctgtggaccattaccgtactgcttattttattcgccccgttctttatttttgtcttctcgccgttgctgcaaatgaacattatcgccggcgcgctggtggggggcatttatttaggcgtggtattttccagcggttccggcgcggtcgaggcctatattgaacgcgtcagccgcgccaaccgttttgaatacggcaaagtgcgcgtctcgggctgcgtcggctgggccctgtgcgcgtcaattaccggcatcttgttcggtattgatcctaatataaccttctggatagcctccggttttgcgctggtgcttggcgtgttattatggctatcgcgcccggaagccagcagcagcgcgcaggttattgacgccatcggcgccaaccgccaggccttttctctgcgtacggcggccgaactgctgcgaatgccgcgtttctggggatttattatttatgttgtgggcgtcgccagcgtatatgacgtttttgaccagcagttcgcaaacttttttaaaggctttttcgccacgccgcagcgcgggaccgaagtttttggctttgtcaccaccggcggtgaattactcaacgcgatgattatgttctgcgccccggcaattattaaccgcatcggcgcgaaaaacgccctgctgatcgccggtataattatgtcgatgcgcattctcggatcttcatttgcgacttcggcggtggaagtggtcattttaaaaatgctgcacatgtttgaattaccgttcctgctggtcgggaccttcaaatatatttcttccgcatttaaccctaagctttccgccaccctatttttaatcggctttaacctgtcgaaacagctttccggcgtagtgctttcggcctgggtcgggcggatgtacgacaccgtgggttttcaccaggcctacctgatcctcggctcaatcaccctgagctttaccctggtatcgctatttaccttaaaaggcggtaagacgctgctacccacggcagagtataacaacgcggcctgagagattaacgttccgtcagggatgacggcaacgccgctttaatttgcgtttgcccaccgttattttccaattcgtagatgcggctctgcgcacgcgccgagatcaattgcgccagttccgccgagtggctggtgagccagatctggctatagcgtgatgcttcgacaatcagtcgcgccagcgccgggaacatctgacgatgcaggctgttttccggctcattaatggcgagaaaggccggtggtcgtgggctgagtaaggcaaccgccaggcataaaaaacgcagggtaccgtcagacatctccgccgccagcagaggccgataaatcccctcccggcgcatcttcatcacgaaccgcgagttgtcgttctcacagaaaaaggtacagtcggggaacgcttcgccgaggatttcatgcagcaactcctcagcgccaatttcgacgatagtctgaaatgccgccgccagattgccgccatcgctatcgagcaccggcgaacggtagccgaccgtcggctggcgcagcggtgaaagcctgccgatggcaaactcatggtaaaaacgccaacggcgcatggtctcccgcacgcgcgatacttccggaaaacgatgcggctcgccaagctggccgaaaatagactcgttttcgtaaatggtatcggtgaaggtacttttttcaccattgacatcgaccaggaacgccgcctggtttttccgctgcagtacacgcgatgatggccggcggttaaagcccgacagccagatattctcttctttaacgatcggatcgagcatgaactgcgtcggatacggcagtttttccggaaacccgacctgcagttcatattcaaattcatcggtcaggcaggcgatttgcagacgccgtgggtggcggtcggtcggcgcctgcttgcctgaccacatgatgttctccagcccgccctcctcgctgacatagctggagaactggccgttagccgaggcggttaacagatggattgctttgtagatattcgattttccgcaaccgttagggccaaacacaatattcagcggccccagttccagttcaatcgctctgactgaacggaaattattgatacgaatacggttaatcatgccattcctcaggcgtgccgacgctcaactgagcgattttttcatcccgcgcgtcagcgcgactctggcgagcttatcggtatccaggtgtgtatcactaaacacgccgaaaaacaggcgttcattatcaataacctgcgacaccacccggtagttcagcggaagcccggatggcgcgccgtactgcgcaggcgtgacggaaacttccgtcgcggtgtcggcgacgctgaccagcagaccatctgctttgccgcccaccagcatgaccttaattaacgggtgcactgtgttcctcccgagtggggtcaaaaatgtcattgaacaagtccctggccacgcccaagcgccgcaggaaaaaacatcatcgtaagtacttttttatagttcatagcggccaggaatataaaaaaaaacaaattgcactttgtaagtacgcattattagtagtaaaggccgacaaatgatgaaggaaaaaagtggaattgtgaatcttaacaactcttatttgttgctccgggcgttgagaatggtcgcaaaatgtacattggtgacagtagcatgccgtgcgttttggttgcccgaacaaggcgcaatgcgccgccgccgggaaaaaccctggcggcggcgggtagcacagtatctacaaaccgcgatttttcaacatcggctcgatcagcggatcgtgcccgcgccagtcgcgatacagcgcttcgagatcgcagctgttaccgcgcgataagatcgcctcgcggaaacgttgaccgttttcccgggttaatcccccctgctcgacaaaccactgataaccgtcgtcggcaagcatttgcgtccacagataggcataatagcccgccgcataaccgccgccgaaaatatgtgagaaatagctgctgcgatagcgcggcggaaccgccgccagatccatctgctcctcgcgcagagactgctgttcgaaagcatcgacatcctgcggcagcccctgcggggtgacgctgtgccagtgcatgtccagcagcgccgccgccagcagttcgctcatgtcataacccttattgaacgttgaggcgcggaacatgctgtctcgcagatcgtccggcatggcttcgccggtctggtagtgcttcgcataatgggcgaagacctgcggctcgcgggcccaatgttcgtaaatctgcgacggaaattcgacgaaatcgcgcggcgtattggtgcctgaaaggctcgcataacgctggttagcgaacaggccgtgcagcgcatggccaaactcgtggaacagcgtgatgacgtcatcccaggatagcagcgcgcagccgccggcttttggtttctggtagttgcaaacgttgtaaatcaccggatgctgggcacgcagcgtcgattgctcgacaaatacgtccatccaggcgccgccgcttttgctatcacgcgagaaataatcgccataaaacagcgccatgccttcgccgttggcatcaaagatttcccagacccgccaatcgggatggtaaagcggaatatcaaaaccgttcgacaaaagggatgccaaacagttgggagccggtccagaaaacgccatcttgcagcacccggtccagagcgaaatagggttttagctgcgcttcatcgatggcgaatttagcgcgccgcacctgctcgccgtaatataaccagtcccaggccgcggcctgaaaatcaccgccctcttcatcaataacctgctggatgtcggcaagctcctgttcggcgcgtcggcgggccgcaggcgcgatgcggcgcataaaggcaagcgcctcagacggcgttttcgccatttgatcggccatcgaccagctcgcgtaatcggcgacaccgagcaatgcggccttacgcgcgcggatttccgccagccgcaaaaccagttcacgggtgtcgttggcatcgcccttctggttacgcgtccagcccgcggcgaacaaattgtgccgggtctggcgatcggcaagtgcctgcagcgccggttgctgggtggtattggtcagcgccagcagccaacggtcatgcaggcctttgtcgcgcgcggcatcggcggcggcggcaatctcatccgcggccagtccgtcaagctggtgtagataatcaacaaccagaccgccggacttcactgccgccagcagacgctgctggaactgactttgcagcaacgcctcctcggtattcaatgcttttagcgcggttttctgctcttgcgccaacgcggctcccgccagctgaaaacgctgccagctcacttcgagcagacgacgcgactccggatccagactcagggcatcgcgctgctgccaaacctgtttgactcgctggtacagcgcatcgttgagccagatatcgttgccaagctcggcgagctcagcggaaaactgttcgtccagttgctgtatcagcggattggtattcgccccggccatcgcgaaaaagacccgggtcacccgccccagcaactgaccgctctgctccagcgcgaccagggtattgtcaaaatccgccggcgccgggttattgattatcgccgcgatctcctcgcgctggcgccgtacgccctcatcaaaagccgggcgataatgactatcttcaatcaaatcaaaatgcggcgcctggtacggcagtaggctgacgtgtaaaaagggattattgtccgtcatcattctctcctgaacgcgggtatccactaagattaggcaactcgttgattggtcgcaatgatttatcctaccagcgcgttataccaacagatgacgatacgattttcctttaccgcgcggcgttatcgcatgctatgttatgacaacacaaaaagcgttgaggaacagtaagatgattattctggtgactggtgcaactgctggatttggcgaatgtattactcgtcgttttattgctaacggccacaaagtaatcgccaccgggcgtcgtgaagaacgcctgaaggcgctcaaagaggagcttggcgataacctgtataccgcgcaactcgatgtgcgtaatcgcgccgccatcgaagagatgatcgccgggttgcctgcacagtggcaggctattgacgtcctggtgaacaacgccggcctggcgttaggtctggaacccgcccatcgcgccagcgttgaagattgggaagacatgatcgataccaacaataaaggcctggtttacatgacccgcgcggtgctgccggggatggttgagcgtaatcgcggccatattattaatatcggttcgaccgccggcagttggccctacgctggcggtaacgtctacggcgcgaccaaagcgttcgtgcgccagttcagcctgaatctgcgcaccgatttgcacggcactgcgattcgcgtcaccgatgtcgagccgggcctggtaggcggcaccgaattctccaacgtacgatttaaaggcgacgatgcgaaagccggtaaaacctatgagaacacccaggcgctgacgccggaagatgtcaccgaagcggtgtggtgggtcgcgaatctgccgaaacacgtcaacataaacacgctggaaatgatgccggtcagccagagctttgccggtctcagcgtccatcgtcagggctaacgtcctctgcggcctggcctgcgggccaggtctgggcggaacggtaaaaaacgagtaaaataatgctcataacccattaaaaagtaatcatcaatggccgcagaaacgcaactgaatccgacccagcccgtcaatcagcaaatctatcgcatccttcgccgggatattgtccattgcctgatcccgccgggaacgccgctgtcggagaaagaggtgtcggtgcgatttgatgtctctcgccagccggtacgcgaagcctttatcaaattggcggaaaacgggctgattcagatccgcccacagcgcggcagttatgtgaataaaatctcgatgacccaggtacgcaacggctgtttcgtgcgtcaggccattgagtgcgcggtagtacgccgcgcaggttcgatgatcaacgatgaacagctctatcagctggagcaaaacctcaaccagcagcgggtggcggtagagcgtcagcagctcaatgattttttccagctcgatgacgaatttcaccagaaattgtctcttatcgccgactgccagctggcgtgggacaccattgaaaatattaaagcgaccatcgaccgggttcgttatatgagtctcgatcacgtgaccccgccggatatgctgctgcgtcagcatctcgatatttttcatgcgctggaaaaacgcgatcttgatgccgtcgaacaggcgatgaatatccacctgcatgagattagcgagtcggtattgttaattcgtcaggaaaatagcgagtggttcagcgaagaataatgggataagcggcagccaacgttgcgtcagctgccgtaaaatagattaccgcaccactaacaccggaacgttggcatagcgtaaaacggattcagcgtttgaaccaagaaggtgggttgaaatacccggtttacgtgagccaataacgataacgtcaaacttttctttttcgctcagcgctaatatttcatcacgcacattaccaaaaacaatgtgggtatggatccgcgaagccggggtagaaaacaaccgcgagagatcgcgcattttcttttccgactcctctttcatataggcttcaaatttacgaatatccgccgtaaagccgcgcagcaaagaactggtgctgttaggcagcacgttcagcaacgtgatttcaccctcttcggcagatgctaaaaaatcggcgtgacgaacggccttatcgcttaaatccatttcaaaaacatcgaccggcaacagtatttttttgtacatagcctgagctccttagtcctgaagaaaccgttgggatgattttattctgccatatttaaacgtatgggaatacgatcaatcacccaaataaatacttcagagataaaaataaatttcagaaatgtataattaattatagatttttagagtgatgtacaggcgggaaatatcaaaaggtattcgtattgctaatacaaaaatagcccggcacgctatacgttgccgggctactaatggaatgatggttttttactgggctttagcccattcggcaacggtcgccttcgcgccgtgaatctgtaaagagagatacgccgccgtcaccgcatcgacaaaacgcgcttcctgcggcaggctatcgccgaaaatggccttaatacccagcagcgcctgcacgcgttcgctaccctctttactgccctgcaccgcctgttgaattaccggcagcagcggatcgctgatttcaatcgcctgcccctgatcatcgacgccgctcacgtagcgcatccagccggcaatacccagcgccagcaggctgaaatcactgtgatgcgccaggtgccagcgcacggaatcaagcatacgctgcgggagcttctgactaccgtccatcgcaatctgccaggtgcgatgcttaagcgccggattgctataacgctcaataagcaaaccagcataacgcgccagatcgacgccctgtacttttagcgtcggcgcttgctcttgcaacattaacgcctgcgcggcgcggcggtagttatcatcctgcatgcaatcattgatatgctgataaccggcgagatagcccagataagcaaggaacgagtggctgccgttgagcatacgcagcttcatctcttcaaacggcaccacgtcagtgaccagctccgcaccggctttctcccactgcggacgaccagccacgaagttatcttcgataacccactggcggaacggttcacaggccacaccagccggatcgcgcaccccggtgagttgttcaattttatccagcgtatctgcggtcacggccggaacgatgcggtcgaccattgtggaagggaacgtcacgttctgctcaatccactgcgccagttcgtcatcaacggcgcgggcatacgcacaaactacgttgcgcattacgtggccgttttccggcatattatcgcaggacatcacgctgaaagccggcagaccggcggcgcgacggcgcgccagcgcttctaccaccacgcccggcgccgatttcggctggtgtggagtttgcagatcggcggcaatcagcgggttatcgagctgcagctggccggtggccggagagtggcagtagcctttttcggtgatggtcagcgagacaatcgccacctgcggttcgcacattttcgccaacacgctttccaggccatcgacctgcgcatgcatcgcctgcttcaccacgccgacgacgcgcgcggtccaggcatcggcggacatttcagccaccgtatagagcaagtcctgctgttgcaaatcggcaatctgctgctcaccgccaatgaggttcacttcggtatagccccagtcgctgccgtgttcggcggcaaggatatcggcatataccgcctgatgggcgcggtggaaagccccaaaaccgagatgaacgatgcgagaaaccagcttgctgcgatcgtaagaaggaagcgttgccctggcgtttaaaagcgtgttttccatggtgtctctcatttttatgatgactgataaatcattctcaaacagaatgttttggtgaggtaaaccatcgcacgcaattggtatgacatctttgatttccatcaactaccatacaagaagatccggcgctgtcgcgtttcgtgatcctgcgcgcaatggtgggaatgagccgggaataaacccggctggatagcgttaacgatgagattaggatttcgcgtattggccgttcgcgctcagcgcctggcgcgtaccggcgtccgccgcatcgtggtccagactcaggtcacggtcgcacacttccggcatcagcaaggacgagatgagaccgatagctgaatagcagatcagcatcgcgacaatcggccaccacgaaccggttacgttacagaagataccggccagcaccggcccgaatcccaccgccaccagaccgccagcctcttttgagatagccattctggtgaagcgattacgcgatccgaacatttccgccatagtaatattttccagcgcgaacaagcccagcaccgccacgttatgaatgacaatcagcgatagcataattgtgctggcgctatagcttttatcgacaataatggccagcatcggccaggccagaataatggccgaaatattcacgataatataaggcaaacggcgcccaactttatctgacaaccaacctaacagcggaatagtaataaaaccaattactgagctaatcattaaggcatcggtcggaatcgctttatcaaataatagggtttgaaccagatatcccgcgagaaatgtttgtagtaaaccggaattaccggcctgtccaaagcgtaaaccggtcgccagccagaatgatttactttttaacattgcgccgaacgtgttttgcgcggcggcggctttagcctgaatttcatcggcttcgttgacctgttcaaataccgggctctctttcagattcaaacgcagccagatggcaaagatcattaccacgacgctcgcgaggaacggaatacgccagccccaggcgatgagttgttcgcgatcgagcaggaagaacattatcgcccagatggccgtggcgctcagcgtcccgcagttggtgcccatcgctaccagagaagagatgatgccgcgtttgccttttggcgcatactccgccagcatggttccggcgccggaaatttcagcgcccgcccccagtccctggataatacgcagggtcaccagtaacaccggtgcaaaaatgccaatctgcgcgtaggtaggtaaaacgccaatcaacgtggtacaaattcccatcatggtgatggtaataaacagaacctttttacgcccgatgcggtcccccattttaccgaatatgaaagcgccaacgatccgcgcaatatatcctgcgccataggttcccatcgctaatatcagcgccatagccgccgactgctccgggaaaaatatctcatgaaagaccagcgcggcgcctaaagaataaagctgaaaatccataaactccagtgccgtgccaagccaaccggataccgcggcgcgaattagatccgaggtgcttctctcttttttagctgtcgtcataataataatctctaaagtaggatacagcgaggttatttatatttatgcgttgaaggttaataacaccttacaacaatgcttgcgatcttcttcaaataacgtcatggcatcgacaacatcctcaaaggcaaactgatgggtgatgagccgatccggatttattaatccgtttgccaaccattcaagaaccagcgggaatttattggcattgagtctggaagaataaatagtgagttctttgccggtaatcccctgctgcgccaccattgaaggttcggtagaaaagcccatcaatacgatcctgcccgccggcgaggccagtgcgatggcctctgcgaaaatcgccggatggcaggcggcgtcgataatcagcgtcggccggataccctgcgattccagcgcctgcgccagcggctgttccttattattgatggtcaagtcggcgccgttttgctgcgccatctgcagccgctcggggatctgatcggcaacgatgacctgccgcacgttatagacgcgcttgagcacctgaatggtggtcagccccatcggcccggcgccgtagaccagcgcgatatcctgttcgcgtggtttagcctgcccggtgacattcgccgcaatggtaaagggctccaccattaccgcatgatggtcgctcacgttctccggcaccggccaggcatttttggccggtaccaccgcgtattcgctaaaaccgccatcgcgatggacgcccagcaccaccagcgaagcgcagacgttgggcttatcgaccgaacagggataacagtggccgcagctgataaccggatcaaccgtcacccgctggcccacgactttatccgtcaccccctcgcccacggcatcaatcacgccgaaaaactcgtggccgatgacccggggatatttggcgaacgggttatgtccacgatagatgtggctatctgagccgcaaattcccgccagtttcacctttacccgcacttctccatttcccggctgcggcagcggccgttcttcaatcgccagcgcgtttggctgttggataacaatgctctccatttttctctccttaccaattccacagcgtgccatcttcgaggcgcgccaccggcagacaggcgggttcatagggatatttcgccgccagcttctcgtcgaattcgatgcccagccccggtttatcgcccggatgcatatagccattgtcaaaacgccagctatgcgggaagacctccagcatctgttcggaatagcccatgtactcctgtacaccgaaatttggcacccacaggtcgaaatgcagcgccgccgccatacataccggagagagatctgacggcccgtgagaaccggtgcgtacctggtacaacgaagcaaaatcggcgatgcgccgcatgccgctgatcccgccagcgtgggtaatggtggtgcggatataatcaatgagctgctcttcaatcagctgtttgcaatcccagatgctattaaagacttcgcccacggcaatcggcgtgacggtatgctggcggattaagcggaagcacgcctgattctctgccggggtcggatcttccatccagaacaggcgatactcctcaatgcttttaccaaagcgcgccgcctcgattggcgtcaggcgatggtgcatgtcgtgtagcaggtgctcgttaaagccaaatctttcgcgcacggcggcaaacagccgcggggtaaaatcgagatatttttccgttgaccacagctgttcttccggccacacgcctttggtcgccggctcgtatgcctgacctttgcccttggccatgccgtaggtggtcttcatccccggaataccgcactgcacgcggatcgccttaaaacccatttcctgatggcgggcgtagtcgtccagcacttcatcaatggaatgaccggtggtgtggcagtagaccatcaccccttcgcgcgaggcgccacccagcagttggtaaagcggcattccggcggctttggctttgatatcccacagcgccatatcaacggcggaaatcgccgacatggtcaccgggccgcggcgccagtacgcgcctttgtagaagaactgccagatatcttcgatgcggtgagcatcacggccaatcagctgcggacaaaggtgatctttcaggtatgaggcgaccgacaattcacggccgtttagcgtggcatcaccgaggccgacaatcccttcatcggtggtgatttttaaggtgacgaagttacgccctggacaggtaacgaacacgtcggcggcaacgatcttcatgggtaattccttacatctgtgcggttagtgatcaaaattaaatcaccagacctactaccatacaagtatgatatttaaaaaagatgcgaaggatcacaaacggatgtggttgcgggcccccgttagcgattaattgatgcagtcttttacgatgaagaaataacacagcgcgccggcaaaggtcacgcaggcggcgataaccaaggccaggttgaaggagtgcgtagtatccaccacccaaccggtgacgaccggtgcaaaagaggcgaaaacaaagctgccgaagttctgaatcgccgccaccgacgcgactttattctcgctgaccatcacctgtaccagcccccaggccgaggtcccggcaaagtggacgcagaatagtgccatggagataaaagccaccgcctgggtcggcgagtttgattgcaccactcagcagcgtgccgagcgcagaaagcgtcaggccaaccacaatggccgttttgcgcgtttttgccagatcgtaaccgcggcgcgccagcgcatcgaccaccagcccattgacccacatgcccaccgccgcggccaggaacgggatcgccgccacccagccggttttcgcaaggctcaatccctgctgcgcctgcagataacccggcagccacgcgatatacagccagccggtatagttaaccccggagaagcctaaaatcattccccaggtggtgcgccgtttgaacaacgccagccactcgctgaataccagcgttgggcgcgctttttccggcgccgccagatactggcgctcctcctgctgcagatcgaattgcgcgcggttgcgataccacgcgtaccagcacaggcccacaacgatcccggcaaggccgataaccacgaacatggtgcgccagccccaggctatctgcatcagtaccagcgctggcggcgcaatcgcctggccaagcaccgttgacgagttaaaaatgccgaccgcggtaccgcgctctttttgtacgtaccagtcggtaatggattttacccccgccggcataaacggcgcttcgccaattccgaggccaatgcgtagtaaaataaaatggctaaaggagttcactaccccggtcagcgcctgcatcagcgaccagaaaatcagccccgcccccaatacgatccgcgggccgaagcggtcgagcaaaatccccgagggcagctgcgcgaaaccatatgatagcgagaaggcggaaagcagtacgccaaattcggtcgcgctgagcccgagatcgccgcgaatagcctcaccggcgacgcttaatgacgaacgatcgaggaagttgacgataccggcgataaacagcagcgtcagggtgactttttgcacccggccaatgcgcacgggtttggcgccagcttcgctggcaagggtttgtgtagccataattgcctcttacgataaacagcatgatgcggttagagtaagtaaggcaactagtcggctaccatacaagaatcaaggttaaaattagcgtggaagatcacaaagggcgattttttatcctgatgcgcgacgttaagcccgcccccagcctgcaacgatgatcagcatgccgcatagcgcaatcgccgcccccgcccagtcaaagtggcttagcttcacaccatcgacgaaacgcagccacagcagcgcggtgcagacgtagacgccgccataggcggcatacaccctgccgctggcctccgggtgcagggtcagtagccagacgaacatcgccagcgccatcgcagtcgggatcaacaacagcggcgaaccgccccgcttcagccatagccacggcaggtaacagccgatgatttcacacagcgcggtagcaaagaaaagtaacgtggttttcagcattaaagtttggtaaatgagacaatttgttgcactagtgtacgcgataatgcgcaggcacccatgccattttgtccggtaggcgcgggtagcgagttgtagtaaacttgtccaactggttaaccctttttatcactcaaaggaaatcgtgatgaaaatgacacgcaataaacgctggtgcctgaccgccctgctggcggcaagcgcaatggtctataccgcttcgtccttcgcgcaaaccgacaaactggtgatcgagtccggcgacagcgcgcagagccgtcagcaagccgcaatggaaaaagagcagtggaacgatacccgctcgctacggcagaaggtgaataaacgcgcggagaaagagtgggacaaaaccgacgtcgccttcgatgcgcaggataactgccagaagagcgccaacgtcaacgcctactgggaacctaacaccctgcgctgtcttgaccgccgtaccggtcgcgttattacgccataattccccggcgcccgtgggcgccatcctctatttctattcatgcacacaggatttcccatgtctgacgcccctcacgtcaaactccgcccgcttgagcgcgaagacctgcgcttcgtccaccagcttgataataacgccagcgtaatgcgttactggtttgaagaaccttacgaggccttcgtcgaactctctgacctttacgacaaacacattcacgatcaaagtgaacgccgtttcgttatcgaatgcgatggcgaaaaagccgggctggttgaactggtggagataaaccacgttcaccgtcgcgccgagttccagattatcatctccccggaatatcagggcaaagggctggcgacgcgcgccgctaagctggcaatggactacggctttaccgttctgaatctgtataagctgtatctgattgtcgataaagaaaatgaaaaagcgatccacatctaccgcaaactcggttttatggtcgaaggcgagctgattcacgagttctttatcaacggcgaataccgcaatactattcgcatgtgcctgttccagcatcagtaccttgagaaacatcgtcctcaaggccagacgctactcaagcccacggctcagtaatagtcgatactgtttttgatgctgtagtgtcgcgtcaccgccggctggacgctttcatcgacaacctgcatctcgcagcggatcgggttgtcatgatcgtcatagtcgcaggtttgattgaccttgcctaacgcgcggtcgttaaatacgctcaccgcgctgtaatcgagctttttacgcggatcggtggacggcgtcgatacgacgctgaagcgctcatctttcgcggtggtggttttgcccagcggataaccttcgctgtcgtagcgatagctggaagtactctctttcccgcgagccgtcaccacaaagccgttgtcatcggtctcccagctgacgcccgccgccggcatctcggcgagctggcatttcccctgcagccgcaggcgtttctcctgcgtttgcgcatccagatagtaattcgcgtcaagtaccagcgtcgcgccggttttgttttcgaggtcggtaaaatccagcagatcaaaacagccttctgccgacacctgggcacgcacccgtttcaccatttcgccctggtcgtcgaacaggatctgagtaaaggttttaaccgggccgcgcagcggatcgaactcaaactcattggaaaaactggccatctccggggtaaacgccgccggcgctgacggcttatcgcaggcgctgagcagcaacgccgccgggatcagcaaaaacagtttattcacagccgctacctttttgggaacattccaatcattttagcaaatacaattgtttacaccaattctgctatgcttaaaactggatgacatcaataaggagcttatgatgaaactatcctcatggttgtgcgcggccctgctgctgagttcggcatccgcactggcagcgccggactcctgcgagcgggtaaaaggcgagatccagcaaaagatcatcaacaacggcgttccggcttctggttttagcctggccattgtaccgaacgatcagcctgaccaacccggcgctcaggtggtgggccactgcgctaacgacaccttcaagataatctatacccgcaacggcgacgcggcggccaccgattcagacgggcaataaccgccgctttcgagtgaaggatcttatctctggttgaccggagataagattcgcctacccctatttaagtattattcctcacccatgcgccagcaaccacgctgttgccagcggcatttcgcataataaaaatcatggagtgagcacaatgtcctacccagaacatcccggcggcgtcagccgtcgcaacctcataaaatcctcagcaatcggttcactggccctggctgccggcggtctgtcgctgccgttcagtctacgcgccgcggccgccgccgtgcagcaagccaccggagcagaagaaaaaaccgtatggggggcctgctcggttaactgcggcagtcgcagcgcgctacgcctgcacgtccgcgacgacgaagtggtgtgggtggaaaccgataataccggccacgatatctacggcgatcatcaggttcgcgcctgcctgcgcgggcgctctattcgccggcgtatcaaccaccccgatcgtctaaactacccaatgaaacgcgtcggcaaacgcggcgaaggaaaattcgagcgcattagttggaccgaagcgctggataccatcgcagaaagtctgaaacgcgtggtaaaagagtacggcaacgaagcggtctatattaactactcttccggaattgtcggcggcaatatgacccgctcttccccttccgcctcgccggtaatgcggctgatgaactgctacggcggatcgctcaaccagtacggcacctacagtacggcgcagatcgcctgcgccatgccctatacctacggtagcaacgacggcaacagcacctcggatattgaaaacagtaaactggtggtgatgttcggcaataacccggcggaaacccgcatgagcggcggcggcatcacctggtacctggagcaggcgcgtgagcgctctaacgcccgtatgatcgtcatcgacccacgctataccgataccgcggccgggcgcgaagatgagtggatcccgattcgtcccggtaccgatgccgcgctggtcgccggtatcgcctgggtattgattaacgaaaatctggtcgatcagccgttcctcgataaatactgcatcggctacgatgagaaaaccttgccggccgatgccccggccaacggccactataaagcctatattctcggccagggggacgacgctaccgccaagacaccgcagtgggcctcgcgtattaccggtattcccgccgatcgcatcattaagctggcgcgtgaaattggtatgaccaaacccgcctatatctgccagggctggggcccgcagcgccaggcgaacggcgaactctccgcgcgcgctatcgccatgctgccgattttaaccggcaacgtcggcattaacgggggtaacagcggcgcccgcgaatcgacctataccatcaccattgagcgcctgccggtgctggagaatccggtaaaaaccgccatctcctgctttagctggaccgacgctatcgctcgcgggccggagatgaccgccacccgcgacggcgtgcgcggcaaagagaagctggcggtccctattaaattcctgtggaactatgctggcaacaccatcattaaccagcattccgacatcaataaaacccacgatatcctgcaggacgagagcaaatgcgagatggtcgtggttatcgaaaactttatgacctcgtcggcaaaatatgccgatattctgctgccggatctgatgaccgtagaacaggaagatatcatccctaacgactatgccggcaatatgggctatctgattttcatccagcccgccaccacggcgaagttcgaacgcaaacctatctactggatcttaagtgaagtggcaaaacgccttggcgacgatgtgcatcaacgcttcaccgaaggacgaactcaggagcagtggttacagtatctgtacgccaaaatggtcgccaaagatccggcgctgccgggttatgacgagctcaagaaaatgggcatttacaagcgtaaagacccgaacggccatttcgtcgcctatcgcgatttccgtcgcgaccctgaagcgaatccgctaaaaaccccctccggcaaaattgagatttactccagccgcctcgccgatattgccgcccgctggcaactggaaaaagacgaagtcattaacccgctgccggtctatgcctccacctttgaaggctgggacgatccgttgcgcagccaattcccgctgcaaatgtttggcttccattataaggcgcgtacccactccagctacggcaacgtcgatgtcctacaagcggcctgccgccaggaagtgtggcttaaccccctcgatgccgaaaaacgtgggattaaaaacggcgacatggtgcgcgtctttaatcagcgtggcgaactgcgtattccggcaaaagttacgccgcgtattatgccaggggtaacggcgatgggtcagggagcgtggcacgatgccaatatggctggcgaccgcgtcgaccacggcgcctgcatgaacaccctcaccacccaccggccttcaccgctggcgaagggaaacccgcagcataccaacctggtcgaaatcgagaaggtttaaggagtaaaccatgagcgctcaatacggattttttatcgattccgcccgttgcaccggttgcaaaacctgcgagctggcctgtaaagactacaagaacctgacgccggacgtcagcttccgtcgtatctatgaatatgccggcggcgactggcaggaggacaacggcgtctggagtcagaacgtttttgcctactacctttccatcgcctgtaaccactgcgaagacccggcgtgcaccaaggtctgcccgagcggggcgatgcacaagcgcgaagatggttttgtggtggtcaatgaagaggtgtgcattggctgtcgctactgccatatggcctgcccgtatggcgcgccgcagtacaacgccgctaaagggcatatgaccaaatgcgatggctgtcacgagcgtgtggcacaaggcaagaaaccgatttgcgtcgagtcctgcccgctgcgggcgctggacttcgggccgattgccgaactgcgtgaaaagcacggccaactggccgccgtggcgccgctgccgtcggcgcacttcaccaggccgagcattgtgataaaaccaaacgccaacagccgtccgtgcggcgataccaccggctatctggccaatccgcaggaggtctaaaatgggaaatggatggcatgaatggccgctggttctgtttacggtactggggcaatgcgtagctggcgcggttattgtcagcggcctgggctgggtgtcgctctgcgatcagcgcgaagcgcgagagcggctggtgcgcagcatgttctttatctggctattgatgggaataggttttcttgcttctgtcatgcatctcggctcgccgctacgggcatttaactcattgaaccgcgttggcgcttcagcgctcagtaatgaaatcgccagcggcgccctcttcttcatcgtcggcggattctggtggctattggcggcggtgggaaaaatgccctcggcacttggcaaaatctggttgtttctcaccatgttgctggggctgctatttgtgatggcgatgacccgggtctaccaaattgacaccgtgccaacgtggtacaatggctacaccaccagcgcgttcttcctgacggtactgctcgccggtccgctgttcgctgccctgctgctaaagctggcgaaagtcgatttcaacggctggttttttgccgctattagcgtggccgcactcatcatcagcgtggccgttgttgtcttgcaaagcgcggatctcggcacgatccacagttcagtacaacaggcgaacgccctgctaccggattacggcagactacaggttctacggctgatcctgctggcgctcggtctcggctgctggctgtgtccgctgatccgccgccagccgccgcgcgccgccgggttattgatcgggctgataatggttttagtcgcggagtgtataggccgcggcctgttttatggcctgcatatgaccgtgggtatggcggttgcgggttaacaagacggcgcgcctgtgcgcgccgcagtaaggaatagggtaatgatgcagatcccaaatcgcgacgccgtcgcactaagcgcccgcacgttgggcgcgctgttctcttatgcgccgaatagcgagcaaaacgcgccgctggtcgccgcttttctcgatggtagctggcagccgcagtggccgttcccggtctccgattcactggcaatggaattcgccgccagcagcgacgaggcgctgccgcaagcctggcagcgtctgtttatcggtccatgggcgcttcccgctccgccgtggggttcggtgtggctggataaagagtcggtgttattcggcgactcaacgcttgcgctgcgcgagtggatgcgcaccagcggtatcgcgctggatcttgagcgcaacgaacccgaagaccacttcggaacactgctgctgctggccgcatggctgtgtgaaacaaatcaggatgagttgtttgcgcaactgctggcctggcatctactgccgtggtccgggcgttttctgagcgtctttatggaaaacgccgggcatccgttctatcgggcgctgggcctactggcgcagtcgacgctggctagctggcaggaatatttgcccatcgcggtggcggaaaagcagctgtatcgttaactcaccggccgcgtcgatccccggcgcggcacttatagcttttgcatctaaggttattccctatcacaataacgctatgaatcccaatttcacttccgctaatgcatcgtcttcataactaccctgatgtgcaggtgatgtttcgtcgcctgatcatcgccacgctcgtcggcatctttgcggcgctggccgtggcgctgtttcgccactcgatggtggcactggaaactttatttctcggtaatgatagcggcagtctggtgaacgccgcgcagtcgatgccgtggtggcgtcggctgctgacgccggcgcttggcggaatcacggcggggacattgctctggttatggcaacggcgtagcgtctcgcgtccgcacgccccgaccgattacatggaagcgctggaaaccggcgatggctgtttcgatacgccggcaagcctcgtcaaatcgctggcatcgctgctggtggtcgtgaccggcagcgccattggccgcgaaggggccatgatcctgctggccgcgctggccgcctcgctgtttgcccgccgttttaccccacgcgctgaatggaagctatgggtcgcctgcggcgccgccgccgggatggccagcgcctatcatgcgccgctggcggggagcctgtttatcgccgaaatcctcttcggcaccctgatgctggcctcgctcgggccggtggtcatttcagcggtgatcgccctgctgctgaccaatttactcaatggcggcgccgcgccgctgtaccacgtcgtctttcagcaaaacctgaccgcgctgcattacggtttaatgctggcgaccggcctgctggccgggttgtgcgggccgctatttatctggctgatggactacagccaccgtggtttcgtccggctgaaactgtcgccgccatggcagttggcgctgggtggactcatcgtcggcatgttatcgcttattaccccggccgtgtggggcaatggttatagcgtggtacaaagctatctgctatcgccgccgctatttagcgtcattatcatcgtctttgtctgtaagctgttggcggtgctggccagcagcggctccggcgcgccgggcggcgtctttaccccgacgctattcgtcgggctggcaataggaatgctattcgccacttttagcgggctgtggttagataacgatcagaacatagcgattatgattgggttaaccggaatggcggcgtttctcgccgcgacaacgcatgcgccaatgatgtcgacgctgatgatttgtgagatgaccgggcagtatgtgctgctgcccggtttattgatcgcctgcgtactggcttcggtagtgtcgcggacgttacgccgggattcgatctatcgccatcacgttgccgagcacgtctaagtcaacatactggctgagttcgcgctgttcggcgcgcggcagataaggcagctcgccaatcagcggcgcaggcagctttttgctcaacacatcgatgatttcagcgtagtgcgcaaggccagggttaatgcggttggcgacccagccgattaacggcagaccgtcgttggcgatcgcctgagcggtcaacagagcatggttgatacacccttcctgaatgcccaccaccaacactaccggcagttgttcctgcactacccactcggagagcgggcgtaagtcgttcatcaggctgcgccagccgccggtaccttccactacgacatgatccactctgccgctgagctgctgcaggccgtcactgagtaagccgtagttgatcgggcagctgtgcgccacgctgctttcttcttcgcttaacgcgatgggattgacagcatcatacggcagcgacagcgtcgacacgctctgtaataccagcgcatctttgttacgcagtccttccggcgtctctttgctgcccttcgccacaggcttatacccggcgacgcttttaccgctggcagcaagtgcctgcagcagcgcgcgggatactaccgtcttcccgacagcagtgtcagtacctgttataaagaaacgcttaaacatcactaaccccaaagttgtgtatacgaaaaatacataagagaaataatcaacagtgggaaaagtctacgcgaagccgtcggggcccagattgagatagcgcaatttttggtgcgactatgaaaaaatgttaaccctgtaacagtcggataaggagcgatccgttatagagggcgtctttcaccaaagccgcgccagccatcgttccgcggtttgagaactgggtactctcaaccgcgatatgacgactatatgccggtagcgcctgttgccgaatacagtcagaaattgccggaaacaaaatatcagacgcctgattgaacggcgaaccaataaggattttttgcgggttaaacagattgaccatgatagccagaatacgccctacatgagcgccaacgccggtaatgatatcccgcgccagtaaatcaccctgctgcgccgcctgacataaccattcaacgctcaactgctgttgatgcagcatagagctcatggattttgccatgcgcatctgcgccagttccagcacgctttcgacgctggcgatggtttccaggcagccgtgattgccgcaatagcagcgtttaccataagggtcaacctgggtgtggccgatctccaccaggctgctgctgccggcgtgcaacaggcggccatcggtgatcactcccgcgccgacgttgtggtcgattaccacctggatgacgtcgcgcgccccccgcgaggcgccaaacaacgattcggccatagtccaggcgctaatatcgtgctgtatatagaccgacactccggtgtgattagccagagcctcaccgagcggcatatctttcacgtcatcataaaacggcatccggtggatgataccgttttcagtatcaatgatccccggcaaggtgatggcgattgcggtaagtcgttcgagcttgtgctgatggcgaataaaaaactggtcgatatgctcgatgatccgcgtcagcagcggttgcgcatgctgcagcggcagttccagttgttcttccaccaccagcttgctgctcagatcgcgcagcgccaggtggatttccccccggctgatgcgcaacgacaaataatgccaggcttccgtttcaaccatcagcccgaccgccgggcggccgcggctccccggctcctggatttcggtctcctgcaccaggtgcgcttccagcatctcgcgaacaattttggtaatgctggccggcgccagttgcgcaaatcgggaaaggtcgatacgcgacaccgggccaagctgatcaatcaggcgatataccgcgccagcattagtctgctttatttgatcgatatggcctggttgactgtccgctaccaccgttgactccctttattttcgcgcttcgaaataaacttttggctatggtgaagcacttcgatggtgcacgtcaaatttttacttagccttgtgatttgccgcacatttttacctcgtttttgtcttaattcgccagggcggcggcagcgagaagataatcgcgaaagcgctgcgccgccagaccctgttcacggtgtttggcccacaccagccacatttccgacaccgcatcgggttcactaatcggcagccagcgcatttcatttaactgcacccgcttaaacgaggccggtaggatcgataccccaagacctgaagccacaaggccaatgatggtcattgcctcgccgacctcctgggtgataacgggcgtggtaccgtagcggcgcatcaacccgagaatatcgtcatacaggccggtaccaacgtgcggatcgaaaaagacaaacggctcgcgcgccagctcaagcagactgaccgattgctgacgggccaggggatgatcgctgggcaccatcgccagtagcggttcgcgcagcaccctttcccagcacaaggtatccggcagctgcgtgttgcgcatcaggccaaggtcaagcgccccttcattcagcggcacgatctgttcgcgggtgttggtttcgcgggtctggatatggacatcgggaaagcggcgacgaaaagtggaaagcgtatcggaaaccgctttgataaatggcgccgacgaggtgaagccgatacgcagttcaccggtttcgccgtggtgcaggcgcccggcgcgagcggcggcatcttcaacctgcgtcagtatttgtcggctatcggcgaggaactgcactcccgccgccgtcaggctgacgctgcgattagtgcgggcaaacagccgcgcgccaatctgttgttcgagaatctgaatttgctggcttaacggcggctgagagatattcaggcgcgccgccgcgcggccaaaatgcagctcttccgccacggcgacaaagtaacgcagatgacgcagctcgatattcatatttaaaacgtcttatttgagattattaatatattagacggaatatttacaattttataccctaaaaatgtgagctgaatggtcacatcagtttgtttgtaatccagctgtatataagcaaggaattctccgtgagtaacacaacaaccgctgacaccgcgccggcgagcgatgtcagggataaggtcgcttcccagccaaatcaatttattaaacgcggcaccccggcgtttatccgcgtcaccctggcgctattttccgccggactggccaccttcgccctgctctattgcgtgcagcccattctgccggtgctgtcaggcgagttcggcgtaagcccggccagcagcagtatttcattatcgatttccaccgcgatgctcgccatcggcctgctatttaccggcccgctgtcggatgccattggccgtaaaccggtaatggtcaccgccttactgttggcggcgtgttgctcattattatcaacgatgatgaccagctggcacggtattctgatcatgcgcgcgttgatcggcctgtcgctcagcggcgtagccgccgtagggatgacttatctcagcgaggagatccacccaagcgtggtggcgttttcaatggggctttatatcagcggtaactcgataggtggcatgagcggccgcctgctcaccggggtctttaccgatttcttcggctggcgcgtggcgctggcggtgataagcgccttcgccctcgctgcggcaatcatgttctggcgtattcttcccgagtcgcgccacttccgccctatttcgttgaaaccgaaaacgctgctgattaacttccatctgcactggcgcgatcgcggcctgccgctgttgttcctcgaaggcttcctgctgatgggcgcatttgtgaccctgtttaactatattggctaccgtttgatgatgtcgccatggtcgctgaatcaggcggtggttggcctgctgtcggttgcttacctgaccgggacctggagttcgccaaaagccggcgcgctgacagtgcgttatggccgcggtccagtaatgttgttctttattgcggtgatgctgtttggcctgctgatgacgctattctcgccgctgtggctgattttcatcggcatgctgctgttctccgccggcttttttgccgcgcactcggtcgccagcagttggatcggaccacgggcgcgtcgcgcgcgcggccaggcatcttcgttatacctgttcagctactatcttggctcaagtattgcggggacgctcggtggagtcttctggcatcattacggctggaatggcgtcggcggctttatcgccctgctgttaatggccgcgctgctgaccggcgcctgtttgcacaaccgcctgaaataatcgttaaacgacgtgaccttattggtcacgtccgttcaccacagcccgagtaccgatggtaaccccaacagttctctgagagcatccatagaaagcagtgcgaaaaacacccacgtgaacggattcatactcgcctccgctgacagccagcgcctgttttcagtgtagccgctggtgaagcgcaccgtccgttatggttatcacatgcgcatttttcgatacacgcaaaatgtcgttccagcgactcgaccaaatcaccccgacgcgctagtgtacccactgacaacagatttatttcactcgccacaggccagcagatactatgactgacaacaacaactatcagcagctcacccgcactttccaacggctctcccgcttctctcaccttgccgccatcgccggctgggatatgttcgccatgatgccgcccggcggcagccgcgcgcgcggcgaagcgatggcggagctcggggtgctgcagcaccaaattttgaccgataagaaggtcggtgaatggctggaaaacgcccggcaggaagatcttaacgatctggaacaggctaacctgcgcgaaatgacccgccagtaccagcaagcggcgctactaccggaaagcctggtggaagcgaaatcgctggccggcagccgctgcgaacacgcctggcgcagccagcgcccggctaacgactggcatgggtttgccgaaaacctgcgcgaggtcgttaagctcagccgcgaagaggcgcagatccgtgccgatgcgaaaggctgttcacgttatgatgccctgctggatattttcgaacccgatatgaccagcgcgcgtcttgacgtgctattcgccgatctgaaatcctggctgccgtcgctgctggcaaacgtcgtcgataagcaagcgcagaagacgctgctcgagccacaggggcccttcgccatcaccgaccagcgcgagctggggctggaagcaatgcgggttttaggctttgattttgatggcggccgcctggatattagcgcacaccccttctgcggcggcgtgcctgaggacgttcgtattaccacccgttataacgaaaacgatctactcagcgcgctatttggcgtgatccacgaaaccggccacgcgcgctatgaacagaacctcccgcgtaactggctcgatcagccggttgggctggctcgttcaacggcgattcacgaatctcaaagtctgttcttcgaaatgcagcttggccgcagcgaagccttcctcaaccgcctgctgcccgctgtgcgtcagcgctttggcgaccagccggcgttcagcgcggaaaactttatcgcctggaaccagcgcgtgaagccgggcttcattcgcgtcgatgccgacgaagtcagctacccggcgcacgtcattctgcgctatgaaatcgagcgggcgctgatcgacggcgatattgaagtagacgatattcccgccctgtgggacgagaaaatgcagagctggctgggtatttcgaccctcggcaactatcgtgacggctgtatgcaggatattcactggaccgatggcggtttcggctatttcccttcctatacgctgggggcgatgtacgccgcacagttaatggcggccgccagacgcgcgttaccgaatctcgcacaggatatcgccggcggcgattttaacgctctgttcgactggttgcggcaaaatatctggcagcacggcagccgctttaccacttcgcagctgattaagaatgccaccggcgaagatctcaacagcgagtatttccgccagcatcttaccgcgcgttatctctaagcctgcgcgccggggcctgctccggcgcgttatacccgttcgcttcgcgttgtacatatggttacacgccgataccaaacactcacggaaagctcgaaaagacaagcatatagttacttcaacggccccgcagtggggttgaaatgaagaaaccttttcgaggatatcagaatgaaaaaagtattagctctggtcgttgccgctgctatgggtctgtcttccgctgctttcgctgctgatgcagcaagcaccactcaggcacctgctgctgcaactcacagcaccactgccaagacaactcaccataaaaaacatcacaaagctgccgccaaaccggctgcagaacagaaagcccaggctgccaagaaacacaaaaaagccgcggcgaaacccgctgtagagcaaaaagctcaggctgcgaaaaaacaccacaaagccgccactaaaccggctgcacagaaagcccaggctgccaaaaagcaccacaaaactgccgctaaaccagtagcgcagaaagctcaggctgcgaaaaaacaccacaaaaccactaaacacaccgcagctaaacctgctgctcagccggctgcataatcgtttcggttagtctggtattgtataaatcggcgctgtttcagcgccgtttttttctggagagcgctatgctgcgacgctatcgttttgagctcatcctgatactgctgataatatgcgcgctggtggcaacccgctttttcctctattaggcgccgctaatcatccccctcaataggaaaaccggcttcacgaattgcctgacggcaatcgctgacgcccgcagcatatcccgcttcaatttcgcataccgggctcgcactggagaaaggtaagcgaatcggcgtcgccagttgacgttccagctcgccaatttttacccgcgccgccagcaattccttcgccagttctgggggcgacacttcggttttttcccccgtaatgatcgcccgcaattgcttctcatcgatagtcatcatatccgccagtttgcattcattgacagatattatagccaacgccacctcagtggcgctggcgtgacgctacatggcacgtaccgcctcaatcacgagatagcccatcgctccccacataaaaaaagaaaccagcgaaacataaactaatgcgcgaataccttgtttagacatacaccctcccactacgggaaatgacattgcgcttatgatggccgggtcaacctcacatttcactcaacgggaatcgccaatgacaatgtttacagtgagaaaatgtttcgtagtgaaaataattgagaagatggtaaaaaaacgccaatgaccatgaacttttgcgatcttaaggcgactaaaacaccctcgaaaaattgcgctttgcgaatgtcctgtaaggcaaagtgattattttgccgtcgttttacgtacgttccgatacacgaattatgttgcgttgcacgccgctttctgcggaaatgacaacagcagagataatgcgttaaccatctgaattaacatggttcttgcatagatgaaatgtcttcaggagtcattttaactgccgtttggcttaataaaaattattcttaactttcataaacttaaatctcctgctactttcaatagacataattatctccccagagagtgatatgcgtagagacgtactgttattactgtgttcgttttgtgtatttcccctgtttgctcacgccgatgatgacggcatgagcgcgaaagatatcaaaacgctttttttcggccatgacgatcgtaaagcggtcagcgatccggccagttccccctgggatgccatcggccagttagaaaccgccagtggtaatctgtgtaccgcaacgctgatttcgccgcatctggccctcaccgccggtcactgtttgctgcagccgccgaaaggaaagccggacaaggccgttgcgttgcgttttatctcgcgtaagggcagttgggtctatgaaattcacgggattgacggccgtaccgacccatcgctaggcaaacggcttaaagcggacggcgatggctggattgtcccctcttccgcagccccctgggactttggcctgatcgtcctgcgctacgcgcccggcggcattacgcctgttcctgtgtttcgcggtgataaagaagcgctgaccgcggcgctgaaagcaacggaccgcaaagtgacgcaatccggctacccggaagatcatctggatagcctctatagccaccaggattgtctggtgacgggatgggcgcaagcctcagttctatcacatcaatgcgatacgctaccgggcgacagcggttctccgctgctgttaaaaacggacaacggctggcaggtcattgcagtgcaaagctcggcgccgggaccgaaagatcgctatcgcgccgataaccgggctattgccgtgaccggttttctcgacaagctggaagcgctggctaacgagtgattatccctgctgctggcgcagttgaagcaatgaatcgatcggcatcggttggctgaaataatatccctgaagtcgatcgcatcccgcccgccgcagcagcgccagctgctgctgagtttctaccccttcagcaaccacggtgatccccagcgcattagcgatacgtaccgtgccgcgcaccagttctgccgcctgcgggtcgacatccaccaccccggctaacgacttatcaatcttgaggctatcaaaacgacagctgcgtagataaccaatactggaatagccaatgccaaaatcatccagcgcgacggcgatacctaacgatttcaggttctcgatagccacgcgagcgcgctccgggttttccagtacgtagctttcggttacctcaagctgcaggcggcgggcaggaaactgacagcgtcccagggtttggatcacccgagtttcgaattccgggtcgcggaactgcgccggggatatattgacggaaaggagtaaatcccccatcgtctcgagatcgtaacaggcttgcgacagcgcaaactggcccaaggcataaatcaatccgctgctttcggcaatggggatgaaagcatccggcgccagcgggccttcaggacgtcgcggccagcgcagcaaggcctctacgccttccatcaccagcgtttcggcattgacgatcggctgataccagacatcaaattcgcctttttcgagaccttcgcggataccattttcaatgtgcagctggtgctgacgcgtttcgttaagggtgtcatcataccaggccgctcttcccttaccgcttttcttcgcgtggtacatggccatatccgcacggcgaaacaactcagtactagaacactgcgtcggcaccccgctggcaataccaatactggcgctgatatatattttccgggcgctgagcgcaacgggagtttttaataattcgagcaccgccagggcgaatgctgaggcctgattaaccgcatgttcgccgctcatggtcatggcgaattcatccccgcccatccgcgccagcatcgcccccgccggaacccgatcgcgtaattcgcgggcgatatgggcaatcagcgcgtcgccagtatcatggccgtagttatcgttgacgtctttaaaaccatcgagatcgataaataccacgctctgcatttcattcttaccgcattcgcccatcgcatttaaacgttcaatcaatgcccgacggttcggcaaaaggctcagccaatcgatgagcgcattttttcgcgcctgctgttcgccgcgcgccagcttgtaaagccccaggctactcagcatgataaacagcaaaattaaacttgccgccagaatggcgatgagcctgatgctgtttgacgcggcgcgcgccgcttccgcaccaggaaggcgcggttgccagctcagataggccagcgtctccccgccctctgtgcgtaatggtacgctgtattcgccggcaaactgcgtcgtatgcagacgattaatctggaaagtgttccccagggtttccagcatggttggattaatgtggcgggtaatcaccagatagcgacgggttttatcataaatcggtaagcggccgattgtcgggcgaatcaagccgataccgacaaacgcaatgcccgcgcgggtacgggtgattccggcaaaggcatttttaccgcgtctcagcgcatccgcgtgctgctcgataagggtttgtaacccgctgccgaaaaaaccaatatcggattcggtaaatggctcgctgcgaaaagccccccacaagatgcgatagttttcatccaggataaaagtgccgtcgtagagattattaatcttaaaacccgatccccacgaatcatacagccagtgtgcatcaagatggggcgtataggtttgtttaaccgcatcatcccaaatcgaattatccagtaccaatgacagcacccggttcaccgatgtctgcacggcgccttctaccgaaagcatcgaacggtgtttatctatttcattagttttaatactgaccagatgttgcgacaaatagaaaagagaaatcacagagacgaccaggcccaggccggcaagaaataccagaatggaaaggattttggcagagggaatattccgccagccaggcaaaggaatcatgtgctgtcctcatagcggcgtacagaaagatgccgaatctgcttttttaagcgtaatacagagaacagaatttgccgcctgcgaacgcaggcggcatcatatcaggccagttttatcaataccataccggccaccagcagcacgacgccaacccaacctttatggttcagacgctgaccaaagaggatccagccagcggcaatggtggccgcaatcccgaatccgccccacagcgcataagcgacggacaggtcgataccttttaccgcctgcgacagggcgctaaaggcccctaacactgccgccagcgacagaataccgtagatcttacgacggaagccgtcggaaaatttcagcaatacgttcgcggttatttccagtacgatagccagcgccagccaggcgccgtgaatccactcaaactgttgcatgagctgtctcctcatgctgttttaccgccttttttgtgccggacttaatcagtatgatcccggcgaccagcgttgccagtccggcgagtttaatgactgacaggctttcatcgaacagcagcacgctgaatacggtaatcaacaaaataccgataccttcccatagcgcatacgccacaccgagagcaatttttttaacggcgaaggccaggaaaatataggaaagcgcaatcattgccagcattaaaatataacctgtatgaccgccgctgacgcttgcccatttcatagacaacgtgccggtaatttcagcgacgatagctaaggctaataaaatccaataaaacataatcccttctcctgcttgagaatacaatccatgacggcttacgagagtaaaccgaaaaaattctgacgtagttttagccgtgcgcggtgcgccagctcaggcagagagaatgggactatagcgcggagcgccagtgctgttcgccagcaaatcgggaaaggatgaagggtaatgcgtgatgagtcgaaaaataaaggctgaactgattgttcataaaattacaattatccgcggtgttgcttctcgtcattgcggaaaaaaattgtcctcggtagttaaacacaagtaaatttgtaccatagtgttaatattaactcaaagaatttgcaattctttacgtctaatgcgcgatttcaattagtattttctcaaactgatctccatcataaacgtgtatagcaaagtcgctatgatcaaggacgttttcatcttcaccgtaaggaacccaatggccaaacccatcatcaccctaaatggactcaagatcgtcatcatgctgggcatgttggttatcatccttaccggcatccgttttgccgccgacattatcgtcccctttatcttagcgctattccttgcggtggtgatcaatccgctggtccagttgatggtacgctgtcgggtgccgcgagtgctggcgatttcgctactggtgggcgctatcgtgctactggcggtggtactgctggcgtcgcttggcacctcgcttaacgaactggcgcgcaccctgccgcaataccgcacgtcgctggccgaaccgctaaagacggtcaccccatggctacagcgctttggttttaccgtctccgccattgagctgaataagtatatcgatcccaacgcggtgatgaccctggttaccagcttgttgacccagttgtcgaatgcgatgtcgtccatttttctgttgcttctcaccgtagtatttatgctgttggaagtgccgcagctgcccgccaagcttcagcagctaatgtcgcggccggttgagggaatgggcgccattcagcgggcgatagatagcgtctcacattacctggtactgaaaaccgcgattagcctggtcaccgggctggtggtctggggtatgctggcgctgctggacgtccgcttcgcctttatgtgggggctactggcctttgcgctgaactatattcccaatatcggttcggtactggcggccatcccgccgattctgcaggtgatggtatttggcggcctgtatgaggcgctaatcgtcactgccggttacctgattatcaacctggtgttcggcaatattctcgagccacgtatcatgggccgtgggctggggctctccacgctggtggtgttcctgtcgttaatattctggggctggctgctgggcccggtcggcatgctgctgtcggtgccgttgaccatcatcgtgaaaatcgcccttgagcaaaccaacggcgggcagagtattgccttcttactcagtgacttaagtaaagaataatcggcaatctggctggcctatccgccagccttccctcctttcatcttttccgcttagaccgttactccttttttattattgatccccatcacaaatgggcacatccaatcattactctaaagctaacgattagccggcgtgcttaattgatgcacagcgccgcgcatcgcacactaacttccaccaggacaaacgaaacgatttgtcgaatcaggaggttaacaatgaatgctgaacaaacgacgggacgggtctggaaccgtcgccggacggaaaaacagcggcggctggccgaaacaaagattgccggcaaagtcatccccactgaccaactggtcagcgtactggaaaatctgctcgcccctggcgaccgggtagtactggaaggtaacaaccagaagcaggctgatttcctctcccgcatgctcgccgaggttaatccgcagaaaatccacgacctgcatatgattatgccaagcgtcgggcgcagcgagcatctggacctgtttgaaaaaggcattgcccgtaaactggatttctctttctccggcacgcaaagcctgcgcatctcgcagctgctggaagatggcctgctcgaaatcggcgccatccatacctatattgaactctactcccgcctgtacgtcgatctgtcgccaaacgtcgcgctgatcgccggctataaagcggaccgtaaaggcaacctgtataccggaccgagtactgaagatacgccagcgctggtggaagccgccgccttccacgacggcattgtgatagcccaggtcaacgaactggtggacgacgaatgcgatctgccgcgcgtcgatattcccggctcgtggattgattacgtggtggtcgccgacaaaccgttcttcattgaaccgctcttcacccgcgacccgcgtctgattaagcaagaacatattctgatggcgatgatggcgatcaaaggcatctacgcggaacatcaggtgcagtcgcttaaccacggcatcggctttaataccgccgccatcgagctgttgctgcctacctacggcgaacagctcggactgaaaggcaaaatctgtaaacactggacgctgaacccgcatccgaccttaatcccagccatcgaaagcggctgggtggagagcgtgcactgcttcggcggcgaactggggatggaagagtatatccgcgcccgcccggatatcttctttaccggcccggacgggtcgatgcgttctaaccgcgccttctgccagctggcaggtcagtacgcggtagatatgtttatcggttcgaccctgcaggttgatggtctggccaactcctccaccgtcacccgcggccgcctttccggcttcggcggcgcgccgaacatgggccatgacccgcacggtcgccgccacgccaccccggcctggctcaatatgatcaccgaaccagacccgatgcagcgcggtaaaaaactggtggtgcagatggtcgaaaccttccaggccggcgtaaaaccgaccttcgttgaaacgctcgatgcggtcgaggtcgccaaaacctccggcatgccgctggcgccggtgatgatttacggcgatgacgtgacccacgtgctgaccgaagagggtatcgcttacctgtaccgggcggagagccttgaagagcgccgggcgatggtcgccgcggtggccgggatcaccgatattggcctcggtgtggacgccaaacgcgccgccgcgctgcgccagagcggcaaagtggtgtacccggaagatatcggcattcgccgcagcgatgccacccgctcgctactggccgccggcagcgtcgccgagctggtggagtggtccgacgggctgtacaacccaccggcaaaattccggagctggtaatgaaaaatctctcccccctacacgcagaaagccgcgtcagctggctggcgcataccgccagcgcgtgtctgattgacgaagcccgtctgagtccgaaaccgggtctggtcgatagtcgcggcaacggcgcgcatcaggatctcaatctggacctgatggaacgctccgcccgcagcctgcagccaacctttcacgcactggcgcagcaaagctggcagcgtcctgcggatatcgccctgcgcgaaaccgtcggccgcctcggtcgcgaaggtgaagcgcagatgatgatggcgacaggcggagttaacacccaccgcggcgccatttgggcgctgggcctgctggtcagcgcggtggcgatgttgggtggagagggtcaatcacaggcgatcgccgggaccgccgccgcccttgcccgcctgcctgacggtttcgcgccgaaaagctttagtaaagggctgcgcgccagccgtcgctggcaggtgccgggcgcacgcgaggaagcgcagcgcggatttccgcatgttaccgccctggcgctgccgcaactgcaacagagccgggcgcgaggcgccagcgagcagcaggcgcgccttgatgcgctgatggccatcatgacctcgctgagcgatacctgcgtgctgtcgcgcgccggcatgaacgggctgcatgccatgcagcaaggcgcccgcgaggttctggcggcgggcggttgcgccagcgtcgccggtcgcgccgcgctggcgcgccttgatgcgcagatgctggcgcaaaacgcctcgccgggtggcgcggccgatctccttgccgccaccctgtttctcgaccgggtttccggctaacgcattcagaggatgttatggaacagattacattgtcatttcctgccaaccgcgccctcagcggcaaagcattggcaggagtcgtaggttcaggcgatatggaagtgctttataccgccgcacagggcgccacgctcaacgtacagatcaccacctcagtggataacagccaggcgcgctggcaggcgctgttcgacaggctgaacctgatcaacggtctgcccgccgggcagttgattatccacgacttcggcgccacgccgggcgtcgctcgtattcgtattgaacaagtatttgaggaggccgctcatgcgtaacgatcgcagctttatcgaactgcgcgctcgcgaacgcgcccacgccctgctggacgacggcagctaccgcgaactgctggatccgtttgaaggcattatgtcgccgtggctcggcgcgcagggcatcgtcccacagtccgacgacggtatggtggtcgccaaaggcacgatcaacggccaacctgcggtggtgattgccatcgaaggcaccttccagggcggcagtatgggcgaagtctccggcgccaaaatggccgccgcgctggagctggcggcggaagataaccgcaacggtatcccgacccaggcggtgctgtgcctcgaaaccggcggcgtacgtctgcaggaggccaacctcggtctggccgccatcgccgatattcatgccgcgattgtcgacctgcgccgctacaccccggtggtcggcattattaccggtaccgtcggctgcttcggcggtatgtccatcgccgcggcgctgtgcagctaccttatcgtcacccgtgaagcccgtctcggcctcaacggcccgcaggttatcgagcaggaagccggcattgaagagtacgactcccgcaaccgtccgtttatctggagcatgaccggcggcgaaattcgcgccgccagcgggctggtcgacgcgctggttaacgatggcgttaacgccgttaaaaccgcaatgaacgaggcgatcgccaaaggcgtaccggcacagcaccgcagcgacaactatgacgattatctgcgtcgcttgagccaattcgatacccgccagcaggcggatatcgcgcagattaaacagctttttgcccgggaggataaataatgagtcagttcccaaaccgcgccgcgctgtggctgaataaactggcgcccgacgcgccgctgatgagtggtctgtgcccttcggtgcaggtcgcagatggccagattgatggcgaaagcgtccgctttatcgccgtggtgcctgacgctaacaaccactacccgcgcgccgccggcggcgaagtcggcctgctggaaggctggacgctggcgaaagtggtcaacgaaaccatcgccgccgacgccgatcggcctgtcaaacggccgatcgtcgcggtaattgatgtcccgagccaggcctatggccgccgcgaagaagcctttggcatccaccaggccctggccggggcggcaggcgcctacgccaaagcccgtcttgccggccacccggtgattggcctgattgtcggaaaagcgatgtccggggcgtttttggcccacggctatcaggccaaccgcctgatagcctttaacgatagcggcgtgctggttcacgcgatgggtaaagaatcggcagcgcgcattacgctgcgtaccgtagaggcgctggagaaactggcggcgacgatcccgccgatggcctacgacgtcagcaactacgctacgctcggcctgctctccgccctgctcgatatcaaccatccggatgcgccagacgaaggcgatctgtcactggtcagccgtaccctgcgcgacgccatcgctgacgcgcgcaccgatacctcactgaagtgccgtctgggcgcggaaaaccgccgcagctcgcaactggttcgcgatcgcatgcgcgccagctggtaagacgttcgtacgtaagtagtagaagaaaacctgccggaagcagtctcccggagcgcggaataaacgctccgggaagggacggcttttagaaaaaataacaatcgcgccagtactctattttatttacaggtgatttatgacttatgtgattattcatgctcttgccccgattttcgtcattatgctgctgggcttctgggccggtaaggccgggatggtagataacaaaaacgtctcgctgcttaatatttttgtaatggattttgccttacccgccacgctgtttagcgcgacggtacaaacgccgtgggccggtatcgtcgcccagtcgccgctggtgctggtgctgaccggggcgatgtggatcacctatgccgcgatctacttcctcgccaccagcgtgttcaaacgcacgccgcaggatgccgcggtgctgaccctcaccgtcgccctgccaaactatgccgcgttaggtctgccgatcctcggcagcgtgctgggtgaaggcgcgtcaacctcgctgtcggtggcggtctctatcgcctgcggctcggtactgatgaccccgttctgcctgctgattctggagcgtgaaaaagcccgcgccgcgggtgaaaacagcggttctacgctggcgatgctgccggtgctgatgtggcgttcggtgaaaaaaccgatcgtctggggcccgctgcttggggtggtgctttccgcgatcggcattaaaatgccggacctgctgctggcgtcaatcaaaccgctgggcctggccgccaccgccgccgcgctgttcctcaccggggtgatcctgtcggcacgtaaactgcagctcaatgcgctgatcgctacatcaaccatcgtaaaactgctggtgcagccgtttattgcctggggtctggtgatgttacttggtctgcacggttctatcgccattaccgcgatcctgatgattgcgctggccgccggcttcttcggcgtggtcttcggcaaccgcttcggcgtgcagtctccggatgctgaagccgtgctgctgttaagctcggttctgtgtatcctgtcgctaccgctgtttatctctttgacttcaggactgtaaaccatgtcatcaacgccgcgtccccacgatttagtttggttaaaccacgccagcgccctggaagacattgccgagccatgggtggctcaacagtggcgagccgcgctgccggtggtggtgaggcgcgacgttgacggccaggcccgcatcccggttggggtgcggggcatgaagcgcgaacagcgcgccgccggctgggttcagccgcgcaatatcgtgcgcagcgtcaccccggagatgcttgtcgagcgcgaagcattaatctgctcaccgtttgtctcgcagccgccggttcaggcggctatcgccctcaccttacaacgctggccctggggctggggcgtcaccggcagtaccggctacgcgctggcaaccgaaatcccggtgctgcatgcggcaagcgatctggatctgctgatccgcgcgccgcagccgctggaccgcgaggcattgctggaatggcaggcccgggtggcccaactaccgtgccgcgccgatacccagatagaaacaccgtacggcgccttcgcccttaatgagtggctgcgcgatggccgcgcgctgctgaaaacatcccgcggcgcgcgcttaaccgcgacgccgtggcacagggaggactgatgaagattatatttacttttcccggtcagggcggccagcgccccgcaatgctggcggcaatccccgatcgcgaggctatcctcacccaggcgcgcgccgtgctgggggatgaagtcgataccctcgatagcgccgacgcgctaaagcatacccgtgcagtacaactctgtctgctgatcgccggggtagcctgggcgcgcgaactacagcgccagggcgtggatccgcagatggtcagcgggctctctatcggcgcgtttccggcagcggtgattgccggcgcgctcgatttcgccagcgcgctgcggctggtggcgctacgcggcgatttaatggagcaggcttatcccgaaggttacgggctgacggcgattacggggctgacccgcccgcgggttgaggcgctgatgcagggccacgaggtttatctcgccaacctgaacgccgaaacgcaaatcgtgatcgccgggcgcgatgaagccatggccgaggtggcgcagctggcgctgcaggctggcgccagtaaagcccaacggctggcggtcagcgtgccgtcgcactgcgcgctgttggataaacctgccgcagccctgacaaaagcctttgccgacgtcaccttaacgcgccctcagcgcgcctatttaagcggctcgacggcgcgcgtgctgtgggatccgcagcggatcgccgacgatctggcgatgaacatggcgcgcaccgtgcattggcaggaggcgatgatcgccgctgatgaacgcgacgcgaggctggcaatcgagatgccgcccggcggcgtgctcacctgcctgacccgccaggcgggctggcgcggcgagacaatttcgctggagcgcagcggcgtagacgtcgcccgccatctggcgcagcggcttagcgattaatactgcgggcgtacatgcgcccttccgccgccagcgccagcaggtcggcatcgcgctcgcgatggtgtgaatagacgatagagatcagctggcgcatctgatagggttccgccagctttaacagctgcacatcgttttcgtaaaccttcttcatgcgccccggcagcagcgcaaacccgacgcccgcctgcaccaggcttatcatcgaaaagatatcattcaccctggtcacgatttccggctcaaaaccggctacatgaaaggcctcctgaaatccggcatacgtcgcaaacccttccgccagcgagacaaatttacgatcggcgtaatcgcgcaggtcggcgagctgagtggtatcgagctgttccgtcgccggcgcggcgaggaagatatcatcttcaaatagcggcaccacgtcgaaggccgaattattgtactcgccttcattggtggcgattaaaatagcgtcaagggcatcgtcttccagcatatccagcagcatctgattggagcccatcgtcagatccagttcaagctccgggcgacgcagcttcatccccatgatgatgcgcggaacggtttccagcgtcagagaatagagggtaccgatgcgcaaccgtccctgaccgacgccggcgactttacgcgtcgcctcaagcccgcggctcatcagactcatcacatcctggcagtattcgagcagcgtccatgccgcctgcagcggcagcaggttgcgccctttgtgaacaaacagcgggcagccgactccctcttcgagcgtatgcagcgcgcggtgaacgctaacgctgctgagcttcatggcttcggcggttctggcgatattgcccttcgccataaacatcataaagaccgatagcttgcggaaggtgatctcctggttgatatcgtctttcataacccttccacacccctggtttaattttcttatttcaattcaaaccagtatatcttttatgaggccaaagttgcaggcagcgcgcggcctcagccggtaaaaaacgcaaaaagggaagaccatggtcttcccttttgttcactgcctggatgcgtcgttacagcgccatatcgtgctgcggcgaggcctcgcgcggcgtctctgccggtttggcggtcgcggtcggcgccgtctctggcatctgaatgaccggaggcttggtcagttgcagcgccgcggcggtgtcatcccaaacctgctgggtcagggccacgttgccgtttaacttctcgccgtagctcggcacgatagcgcgaatgcggctctgccattccggcgagttaaactgctgcgggaacatctgcttgagaacgttcagggtgatcggcgcggcggtggaagcacctggcgatgcgccgagcagcgcagaaatcgttttctgctgatcgaccaccacttcggtaccgagcttcagcacgccgcccttctccgcgtcttttttgatgatctgcacgcgctgaccggcctgaatcagtttccagtcttctttacgcgcgttcgggtagtactctttcagcgccgcaaagcggtcatcatcgttgagcataacctggctaatcaggtacttcaccagatcgaagttgtcgagaccaacgtgggtcatcggcagtacgttgctggtggtggtggtactcagcagatcgaagaacgagccgtttttcaggaacttggtggagaaggtggcgaatggcccgaacagcaccacgcgcttaccatcgaggtaacgagcatccaggtgcggtaccgacatcggcggcgcgccaactgaagcctgaccataaactttctgctggtgcagttttgtcagctccgggttctcggtcatcaggaatgagccgcctaccgggaagcccgcatagttgtccgcttccggaataccggttttctgcagcagcttcaacgcgccgccgccggcgccgatgaagacatatttggcgtcgatagcctgctcttcaccgctctgcacgttcttaatcgtcacgtgccaggagttgtcggcattgcgtttaaaatcggtgacttcagaggaggtctgcagcgagaagttgctgctctttttcaggctaccgatcagctgacgggtaatttcaccgtagttcacatcggtaccgaccggcgtccaggtcgcggccactttttgctgcggatcgcgtccttccatcaccaacggcgcccactgtttaatttgcgcgtgatcggtggagaatttcattccctggaataaggtggtctgctgcagcgcgttataacgcttttgcagataatccacattatcgccccacacgaaactcatatgcggcgtggaattaataaacgagtgcgggtcgtgcaaaataccgcgtttgacctgcgccgaccagaactggcgcgaaatcataaactgttcgttgatatccagcgctttgctgacatcaatagaaccgtctgcacgctgcggcgtgtagttcagttccatattcgccgagtgaccggtaccggcgttattccagccgttggaagactccaacgcgacgccgtcgagtttctccaccatcacctgtttccactccggctgcagctcctgcagccaggtgcccagcgaggcgctcatgatgccgccgccgatcagcagaaagtcagtttttttcgaggtatcgccatttgcgtaggtcgccgtactgacgaacatcgctaatgcggtcatagatataatcgtttttttaattgcaggcataatagaaatatcgcgtagcaaaagtgtaataagagccgtcatattaacgcacttttactttattttaaaatatcatttacacttcgatattttaatcaaacagttttttaacttaaaaaatcaacttatttatttcgctggcagttattgtgaaaaatagcgacggaaaatcaggatcaatcgggcgataagaaatatagcgccggtttatttagttatttaacaaaccggcgcggcgaggagattaattaacgttactgagcgttttctcttgcgcttcagccagggcgacacgcaaatggttgttgttttcgctgagcagatcccgcgcctgccaggcatcgagccccgtcattagcatcagaatcgccgtccgacaatgctgattgcaactggccaacgcggctttagcttgcgcgcgcgtacactctgcggcggccatcaccatggcgatttgccgctcctcccagcgcgggctggttgcctgtagatcaacgcgcagattgccgaacactttgccgctgcgtaccgcaaggccggtggttaacagggtgaggatctgccgctgcgccatttgcgctttcggattgccataacccgccaccgcttccggcccggtctgcggcgcaatcataatatccgccagctgcgcggcttcgctatcaggctgctgcgtcaggatcgcaatcggcgtccccagcgaccaggcgtgacgcatggctccccacacccacggcgttttgccgctgacggtgagcgccagcagcatatcattagcgctcagggacaatagctgcatatcccgtaagcccgcgtcataatcgttagccgcccgctcggcggcctgcagcgcgctcccttcgccaccggcgatcatcgccaccagtgagtgattggcttcaggggaatagtcattaaccgtttgcaacgccgcctgcccggatgccccggcgccaacgatcaccagccgtcctccccggctcagggtcgccgcggcgttatccaccagccgggtaatctgcggcaggcaggcatcgatggcgacggctatctgtttgttatcctgctgcagcagggtcagcatatcgagggtggcgagcgtatcgatatggcgcgtttgcgggtggcgtcgttccagcattgatgcggttggcttactgctcataaaacctccatttaaaaccgaactcactgcggcgaaatcaatagcggtgacatatccattcattcatcacggctatttgattgatgcagccagtgtaaagccttcattcacggctttaccgccacgggggtcacagtttgttcacccgacacctaatcgcagcgcgattgcgcgttatccgagcatgagggctacgcatgtcaggcagcggatacccggtacgccggttttactgttattacacggctttatgaaagccgccctatcggcgataatgatcgttcaacgaatcgatcggggttgtcatgaaggaagccgagctacagccgcccgcccgcaagcgcgcccgcagcctgaaattaagtaccgccgtcacgctgatgattggcagcgttatcggcgcggtgctgctgctggtctacgcgctatggtttatgcaaatcagtaacgccactcgcgacggcttaaaagagacggcgctggcggtggcgcgcaccatggccgatatgccgcaggtgaagcgcggtctcggcgagccgccgcagagcaatattattcagccgttggcgcaggccattacccggcgtaacgacctgctttacgcgattgtgaccgacatgcgcggcattcgctattcgcatccggatagcgccatcatcggtaaaccctttatcggcgaggatatccgcccgaccctcgccggccgggaaaacgtggcgattaaccacggcgtactggcgcaggcgctgcgcgtgtttaccccggtattcaatgaacagcatcagcagataggcgtggtagtggtaggtatttcgctgagtaaagttgacaaacagatcgccaatagccgctgggacgttctgctgaccattctgttcagcgcgctggtctgcgcaatcggcacctggagcctggtgcgcggcttgaagcgtattttgctggggctggagccgcaggatatctccacccaattccagcagcgacaagcgatgctgcactcgctgaaagaaggcgtgatcgcggtggatagcagcggccaggtcacgctgattaacccggccgcccgcggcatgttacttagcgggccggataaaagcatcgatcgcaccccgctgctggcggacctgcaggaagttttgcgcagcggcgtgcccatctatgaccgtgcgctcggctgtaatggcctgttgctgatcagcaataccgtcccggtgcgcagccagaacgccatcgtcggcgcgatcagcaccttccgcgataagaccgagatgagtcaactggtgcagcggctggacggcatgatgagctacgtcgatgccctgcgcaccacttcgcacgagtttatgaacaagctgcacgtgatcctcggcctgctgaatatgaaaagctatgacaagctggaagaatatgtgctgcaaaccgcccatgcctatcaggccgatatcggcgaaattcagcaccggataaaatcgccggtggtcgccggcttcctgattggtaaaatccagcgcgccaaagagcgaggcttcacgttgaacctcgccgaagagagcctggtgccggattgccccaatgaaaaacaggtcaccgtactggtgacggtgttaggcaatctgattgaaaatgcgctggacgcgatgagcggccaggaggaaggcgaagtgagcctgctattgcactatcaggatggctggctaagcggcgaagtgagcgacgatggcccggggatcccggcggccaatattgacgccatctttaataagggcttctccactaaaggcgaaaatcgcggcgtcggcctgttcctcgccaaccagcagctccacgaactcggcggcacgttgtccgtcgagtccgaacctggcgtatttacccaattttttgttcacctgccctgggatagtaaaaggaaaaaagcgtgataaatgtattaattgttgacgacgatgcgatggttgccgagctgaaccgcctgtatgtggcgcgcatccccggtttcagctgctgcggcaccgcgtcgacgctcggtaaagcccaggagatgattaacgacccgcagatggcgatcgatttggtgctgctggacgtttacatgcagcaggatagcggactcgatctgctgccgaccattcgcgccagcggccgcgccatcgacgtgattatgattacgtccgccgccgatgccgccaccgttcaaaccgccatgcactatggcgtagtggattatctgattaagcctttccagttcccgcgctttgaagaggcactgaccgcatggcgtgaaaagcgcaaactgatgaccggccagccctattacgagcaggcggatgtcgatcgtctgttgcacggcggcacgccggaagcggctgacgcgcgtaagctaccgaaaggcttaacggcgcaaactctacgcacgctatgccagtggattgatagccaccctgatgtggaattctctaccgatgagctggcggcggcggtgaatatctcacgcgtctcatgccgcaagtatctgatctggctcgcgcagatcaatattctctataccaccatccattacggcgcgaccggccgaccagtgtatcgctatcggctggtcgccgagcagtacggcctgctcaagcagtacagtcagtaatctggtagccgctgtcgagcagttgaaagcggatgcgctgcggtgacgacagaatcacgtcgcggtttttggtgacaaaaatcgcttcaatgtcgtcccgctggcgcaacgccgcgcagcccttctccacgccaaggccatacagcagcgtggtccagatatcgccgtccagtgaatccgcggaaataaccgttacgctgtcgagttcgttatccagcggatagccgctgcgcggatcgaggatatggtgccagcgtttgccatcctgctcgaaatagcgttcataggtgcctgaagtgacaaccgactgcccgctaacggcaatcgagccgataagttcctgcgccgcggcaaagggttttttcagcccaatcgcccattcccctaacgtatgtacattgccgccgagattaatcagcgcctgttcgatcccctgctggcccaggtaatcgcgtacccggtcggcgatatatcctttggcgattgcgccaaggtcgatttccattccggcctgcgccagccacacgctctgcttttcgtcatcgagaatgacatcctgcgggcgggttaacggcagccgggccgctatatccgccgccgacggcacgcgatgcccctgaaagccaatgcgccacagtttaaccagcgggccgatagccagattaaaggcgctgtcgcgcaccatactggcggatttagcgcacttaatcagctgatacaccggacggctaacggtaacgggatgacgcccggcggcatggttgatatccatcacctgcgactgcgcccggttcacggtgagcagatcttcgtagcgtttaattaactgaaatacgcgggaggccagcgcctcatcgtgggaatagagtttgagcaggatgggcgatcccatcaacacggcggagtagctatagacgcggttatcggacattgggctctccttagaagggataagccgggcggctaagccagcccggcatcagcaattacctattatcctctggcacgtttcgccgcctgatggcccgcgagggtaccgaagatgatgatatccgcgaccgcgttaccgccgatgcggttaccgccatggataccgccaaccacttcacccgcggcgtaggcgccgcgaatcggctgctgcgccacattcagcacttcgccatcggtattaatggtcacgccgcccatagtgtggtgcacccctggggcaatacgaatggcgtggaacgggccttcgttaatcggcgcgcgcagcgcggttgtgcggccaaacgcttcatcgtgctgtttttccaccgcgccgttgtagcattccagggtagcgaggaacgcatggtaatccatccccagcttctccgccagttcacgcggcgagctggcgctggtgacgaagcctttggcgatatactcgtcggcggctttgtttttcgcccgcacatgctcgtcgaagacgatgtaagcatagtgttccggcagcgcgataatcgccgcagacactttatcgcgggtctccatctcgttgaagaagcggttcccctgctggttaacgagaatagcgccaccgccgcgaatcgattcggaaatcaggtacgaggtctgctgctcgacggtcgggtgaatttgaatttcgcccatgtccacggtgccggcaccaatacgttccagcagcgcgatcccgctaccggtcgcccctttatggttggtggtcacgaagccttcgaggtcaggacgatatttcaccaccatcgcgctgttggcgctgaagccgccggttgccacgatgatgcttttggtctgcacgtcgatgatctcttgttcatcgttgataagacgcacgccgctcacttcgtcgtggcgcatcaggatctcttctaccgaggtatccagcagtacatcgataccgcgtttggtgatattacgcaccagaccgctaatcaggtagccgccaaccgccgatccatcgcgcggacggtgggtacggtcgatactcatcccgccggtagtggtgatatcgttaagcataatcccacggtccgccaaccattcaatggcttgcggcgcgttttcaacgaaacggcgcagcagctgcgggttgtttttgttgtggccgcccttcagggtttcctgatagaacaactctttactgtcctgaatacctttgacgcgctggaagcgggtttccgcggcgttcatcccggcggaagctttgatggtgttgccgccaatagtcggcattttttcgacgatcagcacgctggcgccttcgtcgtgggcctgaatcgccgcagccagaccggcgccgccgctccccaccaccacaacgtcatagcttttcggcgcggcatcgttgccgccctcttccgcagccagcgctttgctggatttcagcatcgctttggacacggcttttttcaccgcttcgctctggctggtcgcgccggagatagcgtcgacgtgcggcgtgttggcggtcagaatacgttcgcggatctcttcgaagctggtggtaaattcaacgctctgcaccgggcttgcggccagctcaatatccgcaatgcgatcgttttcgaggctgacgttaatgaccagttcgttggcatcgtcctgaacggtttcgacaaacatccccggtttaaatttcgcgtcgcccatgctcatgtcgcggatcatcgcctcaaccagcgagaaacgccacagcggttccggaatatgcagcgcctcgcgctgggtgctgtcgataaagagttccagctcttcgccggcggcgatacgtgaagcccagtccggataggcgatgcaggcgcggccgacggccatcagatcataaccgtgatcgaggccctgttcggcatcagcggcgttaaccaccccgccgacgcccatcaccggcacctgcgccagcgtttcagaacgcatggcgcagtatttttcaatcagcggcgtcggatcgctggtatctacgatagacgggcgcagcgtcgcgccaaccgagaagtgcaggtaatcgacgccgcgggcggctagtttttccagcagatacatggtgtcgtcgaagcggatccccgggacttccatctcttccggcgagaagcgatagccgataataaaggcatcgtcagcgtactggcgggccattttatgcgtgatgtccagcaccgccagtgggaatctggcgcggttgtcgcggctgccgccccactcatcgtcacgctggttggagttcggcgaatagaactgttgaataagataggtgttggcgccatggatttcgacgccgtcgaaaccggcgagaatggcgcggcgtacgccgtcgccaaatttggcaatcatgccttcgacttcttcaccactgagggcgcgcggcatggcggcgccgtcgcgcggcgcggcaatggcgctcggcgccaccggctggcgaccaccaatcaactgtgggtcaaccatgcggccgccgtggtaaatctgcagaatcgctttcgagccttccgcttttatcgcttcggcgattttcgccagtccggcgattttttcatcgttatcaatgccaatagcgcccgggaaggccagaccataatcatcaataaagcagcattcaacgatgatagtcccgatgctgccggcgcgggcgcgatagtattcaacgagctcgctggtgacggtaccatcgaaataaccggtgcaggtggtcattggcgccattagcaaacggtttttcagttcagtcccattcggtaaagtaaatggctgcagaattcgttcgttactggtcatattaatactccagattttaaatattgaaattcagaattgagtgacggaaattttattgtttgtttattttcattcctgttgtcatgccaataatatagcgtgttttttagttactaaattaattacgttagttaaaaaactatttaatacccgcaataacagcaatacctccattgtattattaaatttatatatcgcatttacataatacaaatgaatagtaacatttcggtcacttttgttaatgctggcaaaacacacaaaatgaaaataaaaccaataatttcaatttgttaaatgagaagttggtttgactatttattattatttaagcgatactttaacaattatcgtttttacggataataaccacatcatcatatgtggttattgccaaacgaaaaaaaagatccagatcacctgttttttttgatctcgatcaattgcaatgcaacgtgaaagcgcaatatataaatatccaatgaatttaatttaacgccgcgaaaaacgcgttaaataaccgtttaagcaataaacaatctcgaccattaataattaaagaaactttcgcaactaaaaaaaatcgagtgttgtaagcgaagacggaaccgtattttcaactactagcagatactcattatgaaagagaaaaagacaaccataccgcctgccggtgccgcgtctaacgcggcgtataaacgtctgatcatgatggcgttgcccattatcgtcgccgtactgctgctgttcgtcccggtgcctgacggcttaccgccattcgcctggcactattttgctatcttcgtcggcgttatcgtcggccttatcttcgaaccgctgccgggcgccgttatcggtatcaccggggtggtggtgattgctttatgtagccagtggctgctgttcagtccggaacagatggcggcgccgagctttaagctggccggcgcgtcatttaaatgggcggtcagcggctttggcaactctaccgtgtggctcatcttcggcgcgttcatgttcgccgcgggctatgacaaaacccagttcggccgccgtctggcgctgattctggtaaaatatcttggccgccgcagcctgacgctgggctacgccattaccttcgctgacctgctgctggcgccgtttaccccgtccaacaccgcacgtagcggcgggaccatctacccgattatcgctaacctgccgccgctgtacggttctaaacctaacgatccgagcgcacgccgcattggttcttatctgatgtgggtagccatcaccgccgcctgtatcaccagttccatgttcctgtcggcgctggcgccgaacctgctggcgctggcgctggtaaaaagcatcgtcggtatcaacatctcctggggtacctggtttatcgccttcctgccgctgggtatcctgctgattctggccatgccgctgctggcgtactggttctatccaccagaagtaaaaatcaataacgaagtgccgctgtgggccgctcgtgaactggaaaaactgggcaaactgtcgcgcaatgaaatcctgctgttggtattcgtctgcttcgcgctgatgatgtggatcttcgccgccgactggattgaaccggcgctggctgccctgctggttatcgtgctgatgctgtggaccggcgtgctgtcctggagcgatatcaccaacaacaaagcggcatggaatacctttgtctggttcgccacgctggtcgcgctggctgacggtctctcttccactggcttcatcgcctggctgggtaaagaaggcggcgcgctgatgagcggtatttctccgggcgttgcgaccatcgtcctgctgctggcgttctatctgctgcactacctgttcgccagtaccaccgcgcacactaccgcgctgctgccggccatgctgaccatcgcttcgactatcccgggcatgaatatgcaagtcttcgtcctgctgatggtgacctcgctgggcgtgatgggcatcatcaccccgtacggtaccggtccgagcccgatttactacggcagcggctacctgccaaccaaagactactggcgcctcggcaccatcttcggcgccatcttcctggccgccctgctgctgattggctatccgtggatgtccatgatgttctgattcataaccgccgggtcttcccccggcggtttttatctttatggagtatgtgaatatgtcgacgaaaccctttgtttatcaagacccgttcccgatggcgcatgacgataccgaatactatttgctcagcaaagagcacgtctccgtcgccgaattcgcgggccaggaagtattgaaggttgaaccgcaggcgttaactctgctggcgcagcaggccttccacgatgccgcttttatgctgcgcgtctctcatcagcagcaggtcgcggccattctgctcgacccgcaggccagcgaaaacgacaaatacgtcgcgctgcagttcctgcgtaattccgaaatcgccgccaaaggtgtgctgcccacctgccaggataccggcaccgccatcatcatgggtaaaaaaggccagcgcgtttggaccggcggcggcgatgaagccgcgctggcgcagggcgtctataacacctataccgaagacaacctgcgttactcgcagaatgcgccgctggatatgtataaagaggtcaacaccggcaccaacctgccggcgcagatcgatctctacagcgtcgacggcgacgaatataaattcctgtgcatggcgaaaggcggcggttccgccaacaaaacctatctgtaccaggaaaccaaagcgttaatcaccccggcgaagctgaaaaactacctcgtcgagaagatgcgtaccctcggtaccgcggcctgcccgccttaccacatcgcctttgtgattggcggcacctctgcggaagcgacgctgaagaccgttaagctggcttccgcccgctattatgacgacctgccgaccgcaggcaacgagcacggtcaggccttccgcgatgtgcagctggagcaagagctgctgcaggaagcgcaaaatctcggtctcggcgcgcagtttggcgggaaatattttgcccacgatatccgcgttatccgtctgccccgccatggcgcttcgtgcccgatcggcatgggcgtctcctgctccgccgaccgcaatatcaaagcaaaaatcaaccgcgacggcatctggattgaaaaactggagagcaacccggggaaatatatccctgaacacctgcgccaacagggcgaaggcaaggtggttagcatcaacctgaatcagccgatgagtgagatcctgacgcagctgtcggcgcacccggtctccacgcgtctgagccttaacggcacgattatcgtggcccgcgacattgcccacgctaagctgaaagagcttatcgataacggcgaagcgctgccggagtacgtgaaagatcaccctatctactatgccggcccggcaaaaacgcctgccggttacgcctccggctctctcggcccgaccaccgcaggacgaatggattcctacgtcgatctgctgcaatcgcacggcgccagcatggtgatgctggccaaaggtaaccgcagccagcaggtgactgacgcctgccataaacacggcggtttctacctcggcagcattggcggcccagcggcagtactcgcccagcagagcattaagagcctcgagtgcgtggcttatccggagctgggaatggaagctatctggaaaatcgaggtggaagatttcccggcctttatcctcgttgatgataaaggtaacgacttcttccagcagatccaaaatcagcagtgcgccggttgtaaacaacacggctaattccctccacgcccggcggctcatcgtcgggcgtattctccccctttattcttgaattcacctgacgctgaactatgctcaatccagcagccgcacagagtttgaccggctgaaaaataacaataattcctcttttctggtgtcgcatatgaacaggatccaggcgttgttaacgacgtgttttctgctatggttggccttcccgctttccgcggcagaacctcgtcagcagcccaccgctcgcgagcaggcgcgaaccgtcgcgattttccatcaaccgatcgtcatgctacaggcgacattcggccagaccacgccggaagaacgggttctgcgcatccgcaatacgctacgcgccttcaccgaagccgatatcagccagccgctgcaggtggtgccagtcacccgctacaaccagccggggcggctatttctgatgaatggcaaacctatcatgttgctaagccaggctgacctcgatgaaggcgacgatctgacattggatcaggcggcgcagcgcgttcttgcccgtatggaagcgcaacggacgtcgctgcgtgaacagtacaatacccgctatctgttgttggcagcgctgaaatccgtcgccggcgcgctgctcctcgccctggcctgctatctcgctttccgttcgtggcggcgagtgaggcgctttttccatctgcggatcctcgaaaagcgcagcctgatcccgcataactggcggcgttttctcggcaacattgaaagccggttatacgcgctattggtcatactgctagggatactggcgggttatgtctggctgagttgggtatttagcctgtttccgtggaccagggtatggggagaatcgctcggtgagtggtcggtaggcgtgattcgcgatatttcgctgtccatcgtgtcggcgctgcccggattgatgatcgtactgcttatctttctgattacgtggtttatcatccgcctgctgaaggtggtgttggatcaggtcgccgccgggcgtctgcagatccccggtctgcatccggaaaccgtcggcgccacgcgaaagcttatcgccgtggttatctggctctttgcgctctccgccgcctatcctttcttgcctggggcaaactctctggccttcaagggaattagcgtgttcttcggcctgatgttgacgctgggctcagcgggggtgatgaatcacgccatgagcggactggtgctgatttatacccgcgcgctgcataaaggcgactggatccgcatcgccgataacgaaggccaggtcagcgagatcggcatgctggcgaccaaaatcctgacccgcgagaactatattgtcaccctgccgaacgcggtggtggtcagcggtaaaatcaccaatctcagcgctagtgacccgcagcagggaatcaacctcaccaccggtgtgaccattggttacgacacgccgtggcggcaggtacaggcgatgctggaactggcggcccaccgcgcccagggagtggatcatcaggtggcgccggtggttcgcaaactgggattgcttgactggtatacgtcgtatgaactgcaggtgcggctgttaccggaaacgacgctgccggaggggcgcaacgcgctgcacagcagcattatcgatgtatttaacgaatttggcgtgcagattatgtcgcccaattttgtcatgcaaccgaaaggcgcggtggtggtcgccaaagaggattggtataccgccccggccgtcgcgccgcaggagcgcgacaggtaacgtcgtcccacgccgacgcagcgtcatcaggcaatgccggatggcgctgcgcttatccggcctacaactcaaaatccccggtggcgctatcgcttaccggggctactgtgcggcgtcgatctcggcaaacacctgctgcgcaaggtgcagcgtggcgtttgccgccggtaaaccgcagtacagcgccgaatgcataatcaactctttcagctcatcacgggtcactccgttattaaaggcggcgcgcagatgcatcttaagttccgcctcgcggttgagcgcaatcagcatcgcaatagtgatcatgctgcgggtatggtgatcgagccccggacgcgtccaggtttctccccaggcgtaacgggtgatgaaatcctgaaactcctcattcagcggcgtgaggttctgcagcgtacggtcaacgtgagcatcgcctaataccttgcggcgaacctccattccctgctgataacgttgtttatcttccattttgctcccccagcaaaaagccgttcagcgcggcgttaaaggcagcaggcgcttcaatgttcgacagatgcgacgccttcaacaccaccacctgtgaagtggcgatctgctgatgaaggaagttagcgtcggcgacagtcgtgacagggtcactttctccggcaataatcagcaccggaatcgcaatttgcccgacctctccccgcaggtctgccgccgccagcgcttcgcagcaggcggcgtagccttcggcgtcgctatgagtcagttgatggcataatgcctcgaccacctccggcgcgcgctggcggaaagcatcgctgaaccagcgatccgccgcccccgcggcaaccacatccatcccttcctgacgcaccgcgcgggcgcgagaaagccagcccgactgatcgccgatccgcgccgcggtattggccaccgccaccgcataaaaacgttccggcgcaaagcgcgccagccataatcccgtcagcccgcccatcgaaataccgcaaaacagcgctttgtcgatatttaggtgatcgagcagcgcaatcacatcttcacccaattgcgccagggtcaccttgccgtttttcgtcgttttaccatggccgtgggtgtcataacgcagtacgcgaaaattcgccgtcagcgcatccagctgcggctgccacatggcgcacgtggtgccaagcgagttcgacagcacgataaccggcgcgccttccggcccgtcgagttgataatcaagattcatgatgttgctcctgataacgcgccaacacctggcgcacaaagcgttcggcgctaccggtagccgttgcaggatccagtagcgcgcttaaacgttcgcgggaaagatactgactgaccagcgggtcggccgccagcagatcgacaagcaagccattgcgatccaacgcctgacgacacagcgcttctacacggtgatgcgcctcggctttgccaataaactccgccagcgcaagggttaccgcttccgccataatcagcccgtgagtgatatcgaggtcggcacgcatcttatgcacgaaaacctgcatctcgcgcaccagcatgtcagtttgcgccagcgccccgcccaccagcataatcagctccggtagcgtttcccattccgcctgccagccgccgagcgcgcgctcatgctgttggatttggccggcgtagagggtggcgaccagccccggcgtgcgctgcgccgcggttagaatcgccgcgcaggagaccgggttacgtttgtgcggcatggtcgatgagcccccgcgcccttccgccagcggctcgccgacttccgcaacctcggtttgcatcagcagcgaaaaatcattggcgaattttcccagagtaccgcaaacgccggcgaaccaggcgccgacttcgaggaaacggtcgcgctggctatgccatggcgtatccggcaactgcaggtcgagggtttgcgccaacgactgcgccacctgcggcgcctgctttttcaatgaatcaagcgtgcccgccgcgccgccaaactgcagcgccagcacccgtgggcgcatctcaatcaaccgctgttgccagcgcagcagcgcatccagcgtccccgccagtttaaggccaaaggtgaccggtagcgcatgctgcatccaggtgcgccccggcatcaccgtatgttgatagcgctgcgcctgttcggcgaacgcgtcaatcaggctttgtagcaggctatccgtcgccgccagcgcgccccgcagttgcagaacaaagccggtatcgatagcgtcctgactggtagcgccccaatggacatagcgcgcggcgtccggatcctgtgctttcacccgcgcagtcagctgtttaaccagcggaatagccagattgccggcgctggccgcagcctgtcccagcgcgtcgaaatcaataagcgcatgccggcaggcgttgactatcggcgagactgctgcctgcggcaccagcccgcagtcggcctgcgcctgcgccagcgcggcttcgaaatccagcataccctgtacccgctgcgcatcgctaaaccagtcggttagcggactgctacgcaacatgggggtcaacaaactcatcgcgactccttaaacgcgttcaataatcagcgcaatcccctggcccacgccgatacacatcgtgcacagcgcatagcggccgccggtacgcttcagctgataagcggcggtcatcgccagacgtccgccggaagcccccagcggatgacccagcgcaatggccccgccgttggggttaacgtgggcagcatcatccggcaggcctaaatcacgggtaaccgccagcgcctgcgcggcaaaagcctcattcagttcgatgacatccatctgcgccagcgtcagcccggtttgcgctaacactttgcgcaccgccggcgccgggccgaagcccataatccgcggcgccacccctgccgtcgccacgccgacaacccgcgccagcggctgtaaatcattcgccgacatggcctgttcactggccaacagtagcgcgcaggcgccatcattgacgccggaggcgttaccggcggtaacgctgccgtcggcacggaccacgccgcgcagtttagccagcgcctccagcgaggtactgcgcgggtgttcatcgcggctgaaacacagcggctcacctttgcgttgcggtaccgatacggcgatcagttcatcggcgaaacgccccgcttcctgcgccgccgcggtacgcagctggctacgaagcgcaaaagcgtcctggtcggcgcgagaaatggcgaactcatcggcgacgttttccgcggtttccggcatcgagtgcacgccgtacagcgctttcatctgcgggttaataaaacgccagccaatggtggtatcttccatctgcatcgagcggctaaaggcgctctcggctttacccatcacaaacggcgcgcgcgacatactctccaccccaccggcgatcatcagctgggtttcgccgcttttaatcgcccgcgccgcgacgccgatcgcatcgagactggaaccacagaggcggttaatcgtgctgccgggaacgctctgcggcagcccggccagcaacagcgccatgcgcgccacgttacggttatcttctccggcctggttggcgcagccgtagatcacatcgtcgatcagcgccggatcgagtcccgggttacgctccagcagcgctttcagcggcagagccgccaaatcgtcggcgcgcatactggataatgcgccgccaaaacggccaaacggcgtacgcaccgcatcacagataaatgcctgattcatcataggttccttacgcgctttccgccagttgttcaaaagtcagcgccaccggagtgatgcgctgtagctcttcaaaggagaggccattaaagatttcgcgtaccaccgggccgcggtcggtaatatcgatgaccgccagatcggtatagatacggctgacgcagccgacgccggctagcgggtagctgcactgctcgaccagtttgcattcgccatcgcgggtcagatggtccatcatcacaaacacctggcgggcgccgatagccaaatccatcgcccctccaaccgccgggatcgaatccggcgcgccggtgctccagttagcgagatcgccgctggcggaaacctgataggcgcccagcacgcagatatcgagatgcccgccgcgcatcatggcgaaggagtcgccatgatggaaaaaacagccgccctgcagcagggtgacatactctttacccgcgttgatcagttccgggtcctcttcgccgggctgcggcttcggccccattcccagtagcccgttttcactgtgcaggaacacctctttatcggcaggtagatagttggcgatacgggtcggcaggccaataccaaggttgacgtaagcgccttctggaatatcgcgggcgacgcgctgggccatttcgtcacgagtcagtttttgcatgttcggctcctcaggcgctttgcgcggcggacagattttccagcgagaatacgcgctggacgaaaatccccggggtgatgatgttttccgggtcgagttcgccaagggcgaccagctgcgagacttcaacaatggtggttttggcggcggtcgccataatcgggccgaagttgcgcgccgctttgcggtagaccaggttgccccagcgatcgccctgatgggctttaataagagcaaaatcggctttaatcggatactcaagcacataatggcggccatctatttcccgggtttctttgccttccgccagcggcgtgccgtagccggtcggggtaaagaccgcgccgagccccgcgccagcggcctggatccgcgccgccagattgccctgcggcaccagttccagctcaaccttaccgcggcgatagaggtcatcaaaaacttgtgaatccacctggcgcgggaatgagcagatcattttgcgcacccgcccggctttgagcagcgccgccagccccacttcgccattacccgcgttgttattaataatggttaggtcgcgggcgccctgttcaatcagagcatcaatcagatacgtcggctgcccggcggggccaaaaccgccaatcatgatggtcgcgccgtcgtggatcccggcaatggcctcactcagcgtcgacacgcttttatcaatcatcaggtcgctccttaacgtgcggtaatcgcacttatatgcgttgttcgcacaaaatgtgacccgcttaacgatgctggtcaagggcgataatcgaaatatggtgcgataatcgaacatcgtatatctttagcgaaagaatgtgatcgatggcaaatacggagaacaaaatggacaagcatccagatgatgtagtggcgggcgacggcgatccgtttaagggcgacccgaactttatggcgtcgctggcgcgggggctggaagtgattcaggcttttaccccgcagcgcccggtactgtcgatttcgcagatcagccagaaaaccggcattcctcgcgcggcggtacggcgctgcctgtataccttaagcaaactgggattcgtctacgccgaagacggtaagaatttccagctgcgtccgcggatcctcgccctcggtcacgcctggctggcctcaacgccgctggcgcgctcggcgcagccggtgctcaagcatctgagcgaaatgctcaatgaatcctgctcaatcgccaccctcgatggcgacgatatcctgtatatcgcccgcgcctccagttcgcgaattatgacgatcgatcttgatatcggcagccgcctgccggcgtgggcgacctccatgggccgcgtgctgttaagccatcagccggaagaacggctgaacgacatgctgggccgggtgacgatgattcgctacaccccgcaaacggtagattcggtgaataagctgcgcgcggagctaaaacgcgtgcatcagcagggatatgcgttgaacgatcaggaactggaaatggggctgcgttcgctggcagtgccgctatataacccgcaaggacaggtggaagcggcgctgaacgtcggggttcacgcgggccagatgtcgacccgcgaaatgctggatcgggtgctgccggaattacaaaaagccgcccgcgagctaacgctgctgctgcgctagcggctgcgtttggcgtgtagctcccagttctcctgcttagcctgttcggatttacgcagcgccacgtaacaagcgccgctgccgccgtggtgcggtagcgcggcgcaaaacgcctgtacctcgggcaactctggcagccagcgcgccaggtagctgcgaataatattggcgtgggcctggtcatcacggcctttgccgtggatgataagtaaattacgcagcccctctttttgcgcctgtatcacgaaggcgaacagcatttgccgacactgttcgaccggctggcgcagtagcgacaggcttgcctgctggctgtattttccgcgccgcagtttttccagcactccgctttgcagcccttcccgtttgaactccagcggcacggcgagcggcacaatatcgaggtagccggtggtcagataattatcgagctgcagggtatcgatacgctgcggggcgcgcacgttgcgctcacggtgccagtgtacgtcattattgcgtttcagaggctggacatcctccatggcgtcaagaaacagggatttgtcgtcaaggttcatggtctctcctccagcggctatcgcctgctactatagccgcctcgcgcctccccctcaacgcgtttagccgccactgccggcaaatagccccacgcaggatttttaaggaaacaattgacggctttgacgacgaaacaaggtgattaacgaagccgttaacggcgttggtcgcgtatcgcgccgctgaatcaggtagtaggttgccctgggcaacgtttcacgtatgggaatcatcaccagtttatccgccatcatcggatcgtttccgagctctaccggcagaatgctgaggaaatcgctcttcaccaccagactgatgcacgaagagaaggtttcacacacgatatcgaccttgggcgccagcccggcctggttaaacatctcctgcagttgtttaaagtagctaccgcgcggcgttggcatcgtccagtggtgatcgagcaattcagtgagagaagtggcgcgcgccgccggatgtccggcgcgggcgaataccgcgaacggtttctcaaacagtttttcaaagctgaattcatggtcgtacgggccgggatagtaggtgttgatagtgaaatcaagctcaccctgacgcagttcattaatcatcgccagaagttgcccttccatgatccgcaccttcaccaacggatgctgctgatgaaagcggcagatcaccgatggcatcagcgaacgggcgacgctggcgccgagaccaatattaatctgcccggcctgctcgccctgacgctgcagcagttcatcctgagccgcccgcagctcttcaaggatcaggctcgcatgttggtaaaaactttcgccgttttccgtcagcgccaccccctggctgcggcggacaaacagttgggcggaaagcccctcttccagctctttaatcgccttggtcaacgcaggctgcgagatcgccagcgcccggctggcgccgcgaatactcccctcgcgggcaacctcaacgaaagcgcgaatttgatgaaatttaatctgaaatgacatgctttaggtgataaccattgtttatcaaacagaagaaaatgacatctactgtaatcgaacatgctgtggcaggttaagggtgagattgcatgaaaggcgtatgtgataagcaaaagctatcacttcgtgaacgccgtcacacttttttaatatgacaggaagggttatgccgcaacttcatgaattcatcagccaactggcgccggaaatgacgcaatggcgtcgtgattttcacctgcacgcggagtccggatggctggaatttcgtaccgccagcaaggttgccgggatcttagacggactcggttatcaactggcgctgggtcgcgacgttatcgatgccgacagccggatggggctgcccgacgacgccaccctggcacaggcattccagcgcgcccgcgaacagggagcgccggaacgttggctaccggcttttgaaggcggattcgccggcgtcgtcgccaccctggacaccggccgctccggcccgacgctggcgtttcgcgtcgatatggacgcgctcgatcttaacgaacaacacgacgattgccatcgcccgcatcgcgcgggtttcgcctcctgcaacgccggaatgatgcacgcctgcggtcatgacggccataccgccattgggctgggtttggcgcatgtgctacagcagtatgccgatcggctcaacgggatcatcaagcttattttccagcctgccgaagaaggcacccgcggcgcgcgcgcgatggtggcggcgggagttctcgatgacgtggattatttcaccgccattcatatcggcaccggcgtccccagcggcaccgtggtctgcggcggtgacaactttatggcgaccaccaaattcgatgtgcaattcgagggcgtcgccgctcacgccggcggtaaaccggaagatgggcgcaacgcgctactggccgccgcgcaggccgccctcgccctgcacgccatcgcgccgcacagcgccggcgcctcacgggttaacgtcggtgttatgcaggccggcaccgggcgcaacgtggtcccttcttccgcgctgataaaagtggaaacccgcggcgagacggaagctatcaaccagtatgtgtttgagcgggcgcaaaacgtgattgccggcgccgcagcgatgtatgaagcccgctatgaactacggctcatgggcgcggcgacctccagcgccccctctccggcgtgggtgcaatacctgcgtgagcaggcagcacaggtgccaggtgtgatagaggcggtggatcatattgctgcgccggcgggatccgaagatgccactttgatgatggcgcgggtacaggagcgcggcggactggcttcatacatgattttcggtactgaactgagcgccggacatcacaatgagaaatttgatttcgacgaaggggtcatgaccatcgcggtcgagacgctggcgcgcatcgcgctcaactttccctggcagcgaggtgtgtgatggaaaagatctatcaatttgttgatgacatcattgaatcgcgacgcgacgatttttgcgctattgccgatgatatctgggatcatccggaaacccgattccaggaattctggtccgccgcgcggttggccgacgcgctggaagcggaaggttttcaactaagccgtcacgctggtggaatccccaatgcgtttatcgccagctttggcgagggtaaaccagtcatcgccctgctcggcgagtttgatgcgctggcaggactcagccaacaggcgcacagtgctgaaccaacttacgcgacgccgggggaaaatggccacggctgtgggcataatctacttggcaccgcagcgttcgccgctgctgtcgctgcgaaacagtggctgcagcagcatggcggctcgggcaccctgcgcttttatggctgcccgggtgaagaaggcggctcgggtaaaacctttatggtgcgcgaggggctattcgatgatatcgacgccgccctcacctggcatccggaagcctgggccgggatgttcagcaccagcacgctggccaatattcaggcggcgtggcgctttaccggaaccgccgcccacgcggcaaactcaccgcatcttgggcgtagcgcgttggacgccgtcacgctgatgaccaccggcagtaacttcctcaatgagcatattatcgagaaagcgcgtgtgcactacgccattacggataccggcggcgtgtcgcccaacgtggtgcaggcgcaggctgaagtgctgtatttgattcgcgctccggaaatggccgacgtgcagcaaatctttgcccgtattgagaaaattgctcagggtgccgcgctgatgaccgaaaccagcgtcagctgtcgttttgaaaaagcctgttccagctatctccccaatcgcacgctggaagcggcaatgtatcaggccgtatgtcattacggtacgccgcaatggagtaacgaagagcgcgctttcgcagcggatattcgcgccacgctcggcgtgaacgatatacagaacagcctgaagaatattgccggcaccagcggtgaagaaggaaaagcgtttgcccgccgccatcacgacacggtgctgattgatgaagtcgcgccgtgggcggcaacggaaaacgtgctggcgggatctaccgacgtcggcgacgtgagctggaaagcgccggtggcccagtgttttagcccctgtttcgccatcggtacgccgctgcatagctggcaactggtgagccagggaagaacctccattgcccataaagggatgctgctggcgggtaagatactgggagcaacggcaattcgtttgttcagcgacaggccgttgcttgaagcaagccagcaggaactggctcaggtactggcggttagcccatatcagtgcccgatcccgcgtgacgtcgtaccatcaattttaaaataagaaaaactagcctctggaatagcgtacagcgcatggcaatcgccaataaaaacaacagctgacaacccctgaggcatgccgcaaccaacacaacaacgacaactgaggaacgcccatgagtatgtcatccataccgtcgcattcccccaccggtaagctgtatggctgggttgaaaaaataggtaataaggttccgcatccatttttgctgtttatctatctgatagtggcgctgatggccgctaccgccatcttgtcggcgctaaacgtcggcgtacagaaccccaccgacggttcgcgagtggtggtaaagaatctgctcagcgtggaagggctgcactggtttctgccaaacgtgattaaaaactttagcggcttcgcgccgctgggggcgattctggcgctggtgctcggcgccggttttgccgaacgcgtcggcctgctgccatcgctgatggtcaagatgtcatcgcacgttagcgcgcgttacgccagttatatggtgctatttatcgcctttttcagccatatctcttccgacgcggcgctggtcattatgccgccgctaggggcgttgatgtttctcgccgtcggtcgtcatccagtggcggggttactggcggcaatcgccggcgttggctgcggattcacggcaaatttactcattgtcaccaccgacgtattgctctccggtatcagtaccgaagcggcgaaaacgctcgatgcctcgctgcatgttagcgtcatcgacaactggtacttcatggctacctcagtcatcgtacttactctggtcggcggattgattaccgataaactggtcgagccgcggttaggaaagtggcagggtaagagcgatgaaaccctacagacgctgacggcggaacaacgcttcgggctgcgcattgccggtatcgcggcgctgttgtttgtggcggttatcgcactgatggtggtgccggacaacggcattctgcgcgatcccatcaagcataccgtgatgccctcgccctttattaaaggcatagtgccgctgattatcttttttttctttgtcgtatctttagcttacggcatcgccaccggcaaaattcgccgtcaggctgacctgccgcagttaatgatcgagccgatgaaggagatggccggatttatcgtgatggtcttcccgctggcccagtttgtcgccatgtttaactggagcaatatggggaaattcatggccgttggtctgaccgatgtgctggagagcgccgggatgaatggggtgccggcatttgtcggcctggcgctactgtcggcgtttttatgtatgtttatcgccagcggttcggctatctggtcgattctggcgcccatttttgtaccaatgtttatgctgctgggctttcacccgacgtttgcgcagatcctgttccgaatcgctgactcttccgtgctgccgctcgcgccggtatcgccgtttgtgccgctgtttctcggctttttacagcgctaccggcccgatgccaaactgggcacctactattcgctggtattaccctacccactcattttcttagccgtctggctactgctgctggtgggctggtatcttgtcgggctgccgataggtcccggcatctatccgcgtttgccctaacgcagcgacaggccagggagggcctgcgtgagttaacgaattgtggtgcggttcaggagcgttttacacagactttcgatggccaacgacagcaaattgatagctaacccactgataatcaacacaacaactcccgttaatatgtattgcatatcgccacctttctgttggttaaaaaaaaccagcgccaaagcgctggaaaaataattgactcaaggaatgcctgtatatttatctgcgacgccgggtgcctcccggtgaattagccagttcacgctaattcgcgtgcgtatgacaaactgcatagagatttgaactgaacgctcctccgcacaggggaattcgccgccagacaaaggtagcaaaatgctctttctgccgcgcctgctagttaatgcaaaaataaacattgctccccgtccctttattccggcaatttgcgattgggcaatcgaatgacggaatttaaatgactgcgattcgtatttataaattaatagtacagcctttcattatttgctgacctttcggaggtatagttggcagagcgcacgtcatgatatggtgtgctcttgccgaaataacctcgtagaaggaagaccgatgctgacgctactgcaagataaaatcgataccccgctggggccgttgtgggtcatttgcgatgaacaatttaacctgcgcgccgtggagtgggatcagcaccgtgaccgtatggagcaactgctcgacatccactaccgccatgagggttatgaacgtcttgatgcgcgcgatccgggcgggctgagcgcgaagctgcggcaatacttcgatggcgatctcgcgattatcgatactctgccgaccgccaccggcgggacgccgtttcaacgtcaggtctggcaagcgctgcgcacgattccctgcgggcaagtcatgcactacggtcagttagccgaggctctcggccgcccaggcgcggcccgtgcggtcggcgcggcaaacggttccaatccggtcagcattgtggttccctgccatcgggtgattggccgtaacggcaccatgaccggctacgccgggggcgtacagcgcaaagagtggttattgcgccatgaaggctatttgctgctttaacagataatgccttttttggaaattacaggtaactttacaataattgatcgcttaataaatttcttgttatcaaagagatagggtgaaaggtatatttccccttctaatattgcgtctttccgggtttcgagacttacttgctcctcaaaaagatgttaaaattgaccaatatcaattaaagcttgagcagacatatgatcccggaaaagcgaattatacgacgcattcagtctggtggttgtgcaatccattgtcaggattgcagcattagccagctctgcatcccctttactttgaacgaacatgagctggatcagcttgataatatcatcgagcgtaagaagcctattcagaaagggcaaaccctgttcaaagcgggtgatgagctgaagtcgctgtacgctatccgttcagggaccatcaaaagctacaccatcaccgaacaaggcgatgagcagattaccggcttccacctggcgggtgatttggtcggttttgacgccattggcaccgccctgcacccaagctttgcgcaggcgctggaaacctcaatggtttgcgaaattccgttcgaaacgctggatgatctttccggtaaaatgccgaacctgcgtcagcaaatgatgcgcctgatgagcggcgagatcaaaggcgatcaggacatgatcctgctgctttccaaaaagaacgcagaagaacggctggcggcctttatctacaacctgtcccgccgtttcgcgcagcgcggcttctcaccgcgtgagttccgcctgaccatgacgcgtggcgacatcggcaactatctgggcctgacggtagaaaccattagccgcctgctcggtcgtttccagaaaagcggtatgctggcggtgaaagggaaatatatcaccatcgaaaacagcgatctgctggcgcaactggcaggccaggcgcgcaacgtcgcctgatttatctccgctatactttcttctaccttgtgccggatcgacatttttttctaatttgttgatctggccagggtcatcccctgtttcaattcatccatataggttatctttttaatgactgactgtagctacagctgtaaggagaccctgtatggcgaagtatcagaacatgctggtagtaatcgaccctaaccaggacgaccagcctgcattacggcgcgcggtgtatctgcaccaacggattggtggacgcatcaaagcctttttgccgatctatgatttttcctatgaaatgaccaccctgctgtcgcccgacgagcggacggcgatgcgccagggcgtgattagccaacgcagcgcctggatccgtgaacaggccaagttttacattgaatccggggtgccaatcgatatcaaagtggtgtggcacaaccgcccctttgaagccatcattcaggaaatcatcagcgataaacacgacctgctgctgaaaatggcccatcagcacgacaaactcgaagccgtcatcttcaccccgaccgactggcacctgctgcgcaaatgtccatgcccggtatggatggttaaagatcaaccgtggccggaaggcggtaaagcactggtggcggttaatctggccagtgaagagaactatcacaacgccctcaatgaaaaactggtgcgggagaccatcgccctcgccgatcaggttaaccataccgaagtacatctggttggcgcctatccggtgacgcctatcaacatcgccattgaattacctgattttgacccgagcatctataacgatgcgattcgcggccagcatctgctggctatgaaagcgctgcgccagaaattcagcatcgatgaaaaccgcacccacgtagagaaagggctgccggaagaggttatccctgatttagctgaacatctgcaggccgggattgtggtgctgggcaccgttggccgcaccggtatttctgccgcatttctcggcaataccgcggaacaggttatcgaccacctgcgctgcgacctgctggtactgaaaccggaagcttatcaaaccccggttgaactggacgatgaagacgacgactaacggcgtctcatgaggtttgaaattatatctaacatcccccgcccgtcgggggatttttttgtcggcccgctaaaaaagaaaaagggccatacggccccggatatcaacgctaattgaacaagcttacagaatgcgttagtggatacctaaacgccaggccaggtcgatctcttcttttagttccatcgacgaaagcgacatcagatcggcaaactcgagctcgaggagtttgagcttcttcaggtactgcgcgggggtcataacagcggtatcgcggcgcaggtactcgatggccatctgcgtgggggttaactcggtatccataatatcctcagtgtggtgaaaaaacaggcatagtataacacccatcgccgttcactttatgagcaaatcatggtttcactgtctatataaaaaagccgtctcaacagagacggcttagagcgttgcgctattacagcgctttcagaatggcatccacgctggctttagcgtcgccaaacagcatgtgggtgttctctttgaagaacagcgggttctgcacgcctgcatagccggtgttcatcgaccgtttaaagaccaccacgttttgcgccttccacacttccagcaccggcataccggcgatcgggctcttcggatcgtcctgcgccgccgggttcaccgtgtcgttcgcgccaatcaccagtacagtatcggtatcggcgaaatcatcgttaatttcatccatttccagcaccacatcgtacggaaccttcgcttccgccagcagcacgttcatgtgccccggcagtcgtccggcgaccgggtggataccgaagcgcaccttgataccgcgcgcacgcaacttctcagtgatttccgccaccggatactgcgcctgcgccaccgccatcccgtagcccggcgtgatgatcacggaatgcgagtttttcagcatttccgccgtctcttcagcgctgatttcacgatgctcaccaacttcttcatcgccgctggaactgccgccatcggtgccgaaaccgccggcgataacgctgataaacgaacggttcatcgccttacacataatgtaggagaggatggcaccggaagaaccgaccagcgcgccggtcacgatcagcaggtcgttgctgagcatgaagcccgccgccgccgccgcccaaccggagtacgagttcagcatcgataccaccaccggcatatccgcgccgccgatagacgccaccaggtgccagccgaacgccagggcgataatggtcatcaccagcaggcatagtacctgcgttccggtgctgtcggtacgcacgaaggccaccagcagcaggaaggagatgactaacgccgccaggttcagcttgtggcgattcggcaacatcagcggttttgacgaaattttgccgcgcagcttaccaaaagcaacgatcgagccggtgaaggtcacggcgccgataaagatgccaagaaacacttcagtcaggtgaatattcgccagcacctgatcgagccccggtccgtggtcgagataactgttgaagccgaccagcaccgccgccagaccaacgaagctatgcagcaccgccaccagctccggcatctcggtcatttcgactttcttcgccagacgaataccgatcgcgccgccgataaccatcgccacgatgatccagccgacgttatcgctgtccggcccaaagatggtggcaatcagcgcaatcgccatcccggcgatgccgtacaggttcccctgcttcgacgtttcgtgctttgacagccccgcaaggctaaagataaacagaatagcggcaacaatgtatgcagctgtaactaatcctccagacatgtgctaccccttagtttttgcggaacattttcagcatgcgctgagtgacggtgaaaccaccaaaaatattaatgctggcgatcaacaccgcgataaagcttaagaagctgacccagccgccgtgccctatctgcagcaatgccccaacgacaataatccctgaaatggcgttggttaccgacatgagcggcgtgtgcagcgcgtgcgacacgttccacaccacgtagtaaccgactacgcaggagagcgcgaagacggtaaagtgacccagaaactctttcggcgcgacgttcgccagccagccaaagaggataatcgccagcgccatcagcgcgtatttacgccacggcgaagctggtttagcctcttcttttggcgcttcgacggttttcgccgccgcctgcggctgcgcggagacctgaatcggcggcgccggccaggtaatttcgccctcgcggaccactgtgacgccgcgcaccactacatcgtcgaaatcgatggtgatattgccgtctttttccttgcacagcagcttcagcaggtttaccaggttggtgccgtagagctgagaagattgcgtcggcagacgacccggcaggtcggtatagccgataattttcacgccgttggcggtggtcacgacttcgcccggcacggtgtattcacagttgccgccgttttgcgacgccagatcgaccaccacgctgcctggcttcatggcgtcaaccatttcgcgggtaatcagcttcggcgccggtttacccgggattaaagccgtagtgacaatgatatcgacatctttcgcctgcgcggcgaacagcgccatctcggctttgataaaggcttcagacatgactttggcgtaaccgtcgccgctgcccgcttcttctttaaaatccagttcaaggaactcggcgcccatactctgcacctgctctttcacctccggacgggtatcgaaggcgcggacgatggcgccgaggctgttcgccgcgccgatcgccgcaaggccggcgacgcctgcgccgattaccatcaccttcgctggcggcactttacccgccgcggtgatctggccggtgaagaaacggccgaattcatgcgccgcttcgacaatcgcgcgataaccggcgatgttggccatcgaactcagggcatctaacgactgggcgcgggaaatacgcggtaccgagtccatcgccatgacgttgataccgcgagcggccagcttttccatgagatccggattctgcgccggccagatgaaactcaccagcgtggtgcccggattgagcttcgcaatctccgcatcgttcggcgcgttaaccttgaggataacgtcggagtgccagacgttatccgcgctgacgatttccgcgcccgcctgttcgaaggcttcatcgtcgaagctcgccagtttcccggccccgctctcgaccgccacgctaaacccgagcttaagcagctgctcgaccgtcttcggcgtcgcagcggcccgggtttcctgagctaagctctcttttggtatcccaattcgcatagttttcccttccatcggtttttgatgatggtttatttttttcacaaatgcgccagcggcggcgcaaaaaacgccactcaggtattcatctggaaaatgaaacagtaacaaactttttataacctactgaaaataccgattgtgatctacatcgttaaaacagaatttttgattttattgagaaaaattagtcctgactgcgtcaggcagcaatatttgccttaattttatgccagaacctgataattcgcttacctgagggattaattcgccatttattaccgtcagtatcattgcattaacattacgttaacttataaaagtgatattgattatcgattttgctgttcaaggggctgttttttcaacatatcagtatttgttatatttttgtaacgaacgattcgggcgggaagtgaaaaatgacgcagacagttacgttgtttaaatgcaataatcacctgttttcagtcaacaacaataccagtacatggtttgcgcaaggcaaaggattatttttatgaagcttaagaacacactcctggcgtctgctcttctggctaccaccgcgttgtctgcccatgcagcgaccgagctgactccggagcaagcggcagcgctgaagccctatgaccgcgtcgtcgtcactggccgttttaacgcgattggcgatgccgtacaggcggtttcccgcaaggcggataaagatggcgcagcttccttttatgttgtcgacacctcagatttcggcaacggcggcaactggcgcgtaacggcggatttctataaagaaaacgccccgcaggcggataccccgaaaaaccgtatcattaacggcgtgatggaactgccgaaagaccaggccgtcacgctgatgccgtatgacactgtgaccgtacagggcttctaccgcagccagccggaagtcaacgacgccatcgccaaagcggcgaaagccaaaggcgcgtatgccttcttcatcgtccgccaggttgacgccaaccagggcggcaaccagcgcatcaccgcttatatctataaaaaggatgcgcagaagcgcgtactgcagagccctgatgcgattccagcggattccgaagccggccgcgccgctctggcgaaaggcggcgaagcggctaaaaatgtcgagatcccaggcgtggcctcctctgcggccgtcggcgccggcaccggcgtaggcctgttctatgaaacccaatcgtcgaaaggcggacgttacactgtcaccctgccgaatggtactaaagtcgaagaggtgaacaaaatcaccgccgcgcagatggtgccgtttgatagcatcaaattcaccggtaactacggcaatatgacggaaatctcctaccagactgcgaaacgcgcggcgaagaaaggggcaaaatactaccacatcacccgccagtggcaggaacgtggcggtaacatcaccattagcgccgacctgtataagtaatcggtttcagctgctcaaaaaggcgacatcgggtcgcctttttacattttttcgcccgccgccattgcatgcgttcaagacactccgtaaaatcccgcgccttagcgtaatcctccatttttatgcgatttcgccaaataaatattcttgattcactgttgtcacctcgggaatacaatggaaaagaaactgggccttagcgccctgaccgcactggtactcagctccatgctgggcgcgggcgttttcagtttgccgcaaaacatggctgccgtcgccagcccatccgctctgcttatcggctgggccatcaccggcgtcgggattttgttcctcgctttcgccatgctattgctgacccgaatccgcccggaactggacggcggaatctttacctatgcccgtgaaggttttggcgaactgatcggtttctgttctgcctggggttactggctgtgcgcggtgattgccaacgtctcctatctggttatcgtcttctccgccctgagtttctttaccgatacgccggagatgcgtatttttggtgacggtaacacctggcaggcgatcgtcggcgcgtcagtgctgctatgggtggtgcattttctggtgctgcgtggggtccagaccgcggcaggcattaacctggtggcgacgctggctaaactgttgccgctcggcgcatttgtggcgctggccgctatcgcgttccggctcgatactttccgcctcgacttcagcggcatcgctctcggcgtaccggtatgggaacaggtgaaaaacaccatgctgatcaccctgtgggtatttatcggcgtggagggcgcggtcgtggtttccgcccgcgcccgtcataagcgcgacgttggccgcgcgacgctgctggcggtggtctcggcgctggcggtttatctgctggtcaccctgctgtcgctgggcgttgtcgcccgcccggaactggctgaaatgcgcaacccgtcgatggctggcctgatggtcaaaatgatggggtcatggggcgaagtagtaatcgccgcgggattaattatctccgtctgcggcgcctatttaagctggaccattatggccgccgaagtgccgtatctggcggcgacgcataaagcattcccgcgcctgttcgccaaaaccaataagaataatgcgccttcttcctcgctgtggttgaccaacatcagcgtgcagatttgtctggtgctgatttggcttaccggatccgactacggtaccctgctaaccatcgcctcagaaatgattctggtgccctatttcctcgttggcgctttcctgcttaagattgccgtacgtccgttacataaagccgtgggtgtcggcgcgtgcgtttatggcttatggttattgtatgcgtccggtcctgtgcatttgttattgtcggtggtactttacgctccgggtcttctggttttcctgtacgcccgccgtacgcaccagcacgatcgcatgctcaaacgccgtgaaatggcattaattggttttttgctggttgccgccgttccggcaacgtggatgctggtggggtaagcggttgccctaccgctgaacttgaaaggagatacccatggctgaaccacagcctcgtccggtcctgatcacaggagcaggccgccgtatcggcctcgctctggcacaccattttttaaaccagcagcaaccggtgatcgtcagctatcgccagcattatccttcgattgacaccctgcgcgaagccggcgcggtgtgtctgcaggccgatttcagcagcgacgacggtattcttaccttcgcggaagcggtgaaggcgcagaccagcgggctgcgtgcgattattcataacgccagtgattggatggcggaaaaacccggtgtgccgttatccacggtgatatcgcggatgatgcagattcacgtccacgcgccctatctgcttaaccatgcgctggagagcctgctgcgtggttttggtcacgccgccagcgatattattcacattaccgactacgtggtggaacgcggcagcgataagcatatcgcctatgccgccagtaaagcggcacttgataatatgacccgctctttcgcccgtaagctggccccggaagtgaaggtcaacgccatcgcgccatcgctaattatgtttaacgagcatgatgacgctgaatatcgtaaacaggcgctggataaatcgctgatgaaaatcgcgccgggtgaaaaagagataatcgacctcatcgattatctgttcaccagttgctacgtgaccggccgctctttcgctgtcgacggcggccgaccgctgcgctagtggaaacggctccagccgaggatgagcagccaggccgccagactccagcagatcaccgcgcctgccagcgcgtaaggcaggcgcattacgccagtgaagtaccataatgaaagtaagtagataaaatacgggatgattgaccacatgccgaagacaatagtcgtgcgcagcgcttcaatgccgcgctcgctggcgacgatataatgggcaatcagcgcgaaggtcggaaataacggaattaaaccggcaatatagtaatttttggtttttgacagtacgcctatcagtaccaccaccagcgctcccagcagcgctttaatcaacagccccattttatgccttaacatttgaacaacaatttccaccagcataacggaagaacatttgtttatgaaagattaatggcaggcaatttgctggcggtgtatgttagctttttaatttatacgcgtaagatatgaataagatcgtttttgttgaggatgagcccgaagttggcgcgcttatcgccgcctatctgggaaagcatgatatggacgtggttgttgagccgcgcggcgaccgggccgaagaggttattgctcgtgaacaacccgatctggtactgctggatatcatgctgcctggcaaagacgggatgacgctgtgccgcgacctgcgcagccagtggcagggtccgatcgtgttgctgacctcgctcgatagcgatatgaaccatattctgtcgctggagatgggcgccagtgattatatcctcaaaaccaccccgcctgcggtgctgctggcccgcttacgtttgcatctgcgccagcacgtggcttcgccgtcgatgcccgctcccgcaaccctgacgccgcataaagccattgttttcggttcgctgtcgatcgacccggttaaccgtcaggtattgctcggcggcgacaacgttgctttgtccaccgccgattttgacctgctgtgggagctggcgacccatgccgggcagattatggatcgcgatgcgctgttgaaaaatctccgcggcgtcagctacgacggcatggatcgcagcgtcgatgtcgcgatttcacgcctgcgtaaaaagctgctcgacaacgccaacgagccctaccgtatcaagacggtgcgcaacaaaggttatctgttcgccccgcacgcctgggataattaatcggcgtcaggaatagaccgacatcacgccgtgtagtcggtcttgaaattcagcgtatttctctctgaatgccttttcatcgttttcgtcataccagcgtacgacctcacggctggcaaggaaatgatccagtaattcaccgcttgccagaatccattgcggtaaaccatcgacctgtaggctccagccccctggatgatagtgaatgaaatcattgcgcaactggtgaagcttgtccatcgccaccgtacagtcttcgctgggtgtgaatccgctgctcttcctcgtcgcacggtatagcgtcatgaaggacggcagctgcagtttattgatgttggtgaaatcgtcgttgcaaatttgctggtaaatatctcgagtcgacgctttaccgtcggccaggtagacctgaaagtcatcgccctgacacaacgccaacaccatcgcgttctgcaggatgctgtgccagccggtaatcacccacttccactgataagggtcggcgatcgcctgcatatggctaaggaccatatcgaaggtttttaaaatctcaacatcattatcagtatgcaaatacacgggcttagtcatctggcgctctccatcatttttggggcgcttaaattaacagagaggctggcacgtgacaggacgggcagtcgacttaaaatggctctcggtcattcggcctggcgactctgagagaactttgccgagcgggatccttctcctgtagaatcttttgttgcgagataacccagttaatgaccggtgatgattaatgaaaaaactgtttgtgcagttttaccttttgctgttcgtctgcttcctggtcatgaccatgttggtcggcctggtgtataaattcaccgccgagcgcgccggacgccagtcgctggacgatctgatgaaaagctcgctgtatctgatgcgcagcgaactgcgcgagatccccccgcgcgactggagcaacacgctgaaagagctggacctcaacctctctttcgatctgcacattgaaccgttaagcaaattcaagttgtcggaaagctcgatgcagcacctgcgcgcgggcgatatcgtggcgctggacgatcaatacaccttcattcaacgcatcccgcgcagccattacgtattgtcagtcggcccggtgccctatctctattttttgcatgagatgcgcctgctggacgtcgcgctgatggcgtttatcgctatttcactggcgttcccggtgtttatctggatgcgtccgcactggcaggatatgttgcgaatcgaaaccgccgcacagcgcttcggcgaaggccattttagcgagcgcattcatttcgatagcatgtcgagcttcgagcgactcggcgtagcctttaaccagatggccgataatatcaacgccctgatagccagtaaaaaacagcttattgacggtatcgcccatgaattgcgcacgccgctggtgcgcctgcgctatcgcctggagatgagcgaaaatctgaccgaggcggagtcgcaggctctcaatcgcgatatcgggcaactggaagcgctgattgaagaactgctcacctacgcgcgcctcgatcgcccgcagaacgaactcaacctgaccaccccggatttcccggcctggatccgcgcgcacgtcgaagatattcagctggtcaatccgcagcgtgaagtcgggttgcgccagcttacggcgggcgactacggtgcgctggatatgcgtttaatggagcgcgtgctggataatctggtcaataatgccctgcgctacagccatcaacatattcagatcggcctgtcgctggccggttcacgggcgacgctgcgcgtggaagatgatggcccgggtatcgcccttgaggaacgcgaacgggtattcgagccgtttgtccgtctcgatcccagtcgagatcgcgccaccggcggctgcggcctggggctggccatcgtacacagtattgctcaggcgatggccggtgaagtccgctgcgacgaaagctcgctcggcggcgcggcgttcattttcagctggcctatttaccaccagcttcccgcttttacttctgcttagccgaacttgcgcaggcgttacggcctgcgtatagtttatactcaaatagtatgttgtaactaaggcggtaaacatggcaagctacgacctcgttgcgcgcttaaatgacacctttcgtgagcttgagcgcgagctacaaaccttcaaagcatcgctgagccgctgccgcctgctggcggcgcgggttttcgaattgccggcggtgagcaaagaggcggagcacgcgccgctggataccattcaggtcacgcagcacgtcggccaaagcgcgctggagatggcgctcaggcactacagccatctgtttattcagcagcaatcggaaaaccgcagcagcaaggcggcggtacgcctccccggggcgatttgcctggcggttgatacgcaacagcaggcagagctgctggagaaaatcagcgccattaacgcgctgaaagcggcgtttgagagaatcgtcaccgtcgattccggattgccggccgccgcgcgtttcgaatgggttcaccgccacctgcccggcctgattaccctcagcgcctatcgtacgctgacgccgctgtgcgaccccagcaccatccgcttcggctgggccaataagcatgtgattaaaaatctgacccgcgatgaagtattaatgcagctagagaagagcctgcaatcgccgcgcgcggtgccgccctggacccgcgaacagtggcaaagcaagctggaacgggaatttcaggatatcgccgccctgccgcagcgggcaaaattgaaaatcaaacgcccggtcaaggtacagccgattgccagagtgtggtatgccggcgagcagaagcaggtgcagtacgcctgtcccggcccgctgattgcgcttatctccggcacgcgtggggtaagcgtgccggatcttggcgaactcttgaattacgatgctgataacgtgcagtatcgccacaaaccgcaggcgcagtcgttacgattactgatcccgcgtctgcatttatggctggctagcgagtagcgaggctgccaaccatatcctgcgggcgcacccagctatcgaattccgcttccgtcaggtaaccaagcgatagtgccgcggctttcagcgtcagcccttcatggtgcgcttttttggcgatctccgccgctttatcgtagccgatatgggtattgagcgcggtcaccagcatcagcgactcattaagcaactggtctatccgctcgcggttcggctcaatacccaccgcgcagtgctcattaaagctctccatgccgtccgccagcaggcgtaccgactgcaggaaattgtggatgaccattggccgatagacgttaagctcaaagttccctgacgcaccgccgatattcaccgccacgtcgttacccatcacctggcagcatagcatggtcaacgcttcgcactgcgtcgggttgaccttgccgggcataatggaggatcctggttcgttctccggaatggcgatctcaccgatgccgcagcgcggcccggaggccagccagcgcacatcgttggcgattttcatcagcgaagctgccagccccttcaacgcgccgtgggcatgaaccagcgcatccacggtggccagcgcttcaaatttgttgggcgcggtgacgaacggcagtccgctaagcgacgccagttccgtcgccacccgcaccgcatattccgggtgcgtattcaagccggtaccaaccgccgtaccgcccagcgccagctctgcaagatgcggcaggctgtgttcaatatggcggagattatgttccagcatcgcgacccaaccggagatctcctgccctaacgtcagcggcgtagcgtcctgcaagtgagtgcggccaattttaacaatgtcaccgaaggccagcgacttttcctgtagcgtggcccgcagcgcctgtaactgcgggagtagcttttcgcgcaacgcgattagcgccgcgacgtgcatggctgttggaaaaacatcattcgagctctggcttttattgacgtcatcattggggtgaattttgcgcgccatgccgcgctcgccgccaagcaactcactcgcacggttagccagcacttcgttcatattcatgttgctttgggtaccggagccggtttgccagatagctaacggaaactcctgcgcatgcttgccggcgagaacttcatcggcggcggcgacgatagcgcccgctttgtccgccgccagcaagcccaggtcctggttaaccttcgccgccgcgcgcttggtcagcgccagcgcatagatcaattcatcaggcattttctccgttgagatacggaaatgctcaagcgagcgctgggtctgcgcgccccaaagtttatcggccgggacgtcgattgcgcccatcgagtctttttcactgcgatgcgttgtcattactttctccttggattcaaagtgcgtcatagcgacaaagctcacctgcttaaaggattaagtattaaccagatttattagttgttttggtcgttcgtgccgctaagcggcccaaacaaaaaccgccccgaagggcggtctcgtttacttcacgcagcgcgagcactgcgacgtctggatctgctggaagaagtcgttacctttatcatcaacgaggataaaggccgggaaatcttccacttcgattttccagatagcttccattcccagctccggataagccacgcactcaaggctgcggatactctgttgcgcgagaaccgccgccgggccgccgatactaccgagatagaaaccgccgtgtttatggcaggcatcggtcacctgctggctacggttacccttagccagcatgattttactcgccccgtgcgattgcagcagatcgacatacgagtccatgcggccagcggtcgtcggccccagagaaccggaggcgtaaccatccggcgtcttcgccgggccggcgtagtaaatcggatgatctttgacatactgcggcagcgcttcgccgttatcgataagctctttcagcttggcatgggcaatatcgcgggccacgatgatcgtgccgctcagcgacagacgagtcgacaccggatactgcgacagcagcgccagaatctcgctcatcggctgattgaggttcacctttaccgcttcgccttcaccggcctgacgcaggtgctcagggatatatttgcctgggttgctctccagtttttccagccagatcccctgacggttaattttggctttaatgttacggtcggcggaacaggagacccccatccccaccggacaggaagcgccgtgacgcggcaggcggactacgcggatatcgtgggcgaagtacttgccgccgaactgcgcgccgaggccgaggttctgcgcttccagcagcagctcttgctccagctgcacatcgcggaacgcctggccatgttcgttaccttcggtcggcagaccatcgtagtatttggtcgaggccagtttcaccgtcttcagcgtggcttccgctgaggtgccgccgataacaaaggcgatatggtaaggcggacaggctgcggtaccgagggtgcgcatcttctcgacgaggtagtttttcagcttcgccggggtgattaacgctttcgtttcctggtacagataggttttgttcgcggagccgccgcccttggcgatacagaggaacttatactcatcgccatcggttgcataaagatcgatctgcgccggcaggttggtaccggtgttgacctctttatacatgtccagcggcgcgttctgcgagtaacgcaggttgtcctggatataggtgttgtacacgccctgcgccagcgcggcttcatcgccgccgccggtccaaacgcgctgtccctttttccccatgatgatcgcggtaccggtgtcctgacaggtcggcagaatgcctttggcggcgatatcggagttacgcaggaattgcagcgcgacgtatttgtcgttttcgctggcttccgggtcgttgaggatatccgcgacctgctgctggtgtgccgggcggagcataaaggaggcgtcgtgaaacgcgtgttgagccagtaaggttagcgcctgaggttcaaccttcagaacttcctggccggcgaattcggcgacggagacgtaatcactgctgaggagataatactcggtgtcatcctttttaagcggaaaaggatcctgataaacaaacggtttgttcgacattgtactctcacttactgcttggctgattatgtttcaggcagacactccatttgcctgtagaaaagcgagtcgatcaatcttacacaattttttaacaaaaactgagacaaggacgactttttctttcagcagttgcttctcgacgatttgttggtttaatagagccaacatttttatgtggaaacagggattgagaatgcaaaagctcattaactcagtgcaaaactatgcatggggaagtcacaccgcgttaaccgacctttacggtatcgccaatccggacaacctgccgatggcggaactgtggatgggcgcacacccgaaaagcagctcgcggatccttaacgccgacggccagccgcagtcgctgcgcgaggtcattgaagccgataaaaatgccctcctcggcgctaacgtcgccgagcgttttggcgaactgccgttcttgttcaaagtactgtgcgccgcccagccgctctccatccaggttcacccgaataaacgcgcgtcggaaattggctttgccaaagagaacgccgcgggtattccgctggatgccgccgagcgcaactataaagatcccaaccacaagccggagctggtcttcgccctgacgccgttcctcgccatgaacgcgttccgcgaatttaatgaaattgtcgcgctcctgcagccggttgccggggcgcatcctgccatcggcgaattcattcaacagccggacgccgggcgtttaagccagctgttcgccagcctgctgaatatgaaaggcgaagaaaaagcgcatgcgctcagcgtgctgcaaagcgccctcgaccgcgaacagggcgagccgtggcagaccattcgtctgatcgctgaattctacccggatgacagcggcctcttctctccgctgctgctcaacgtggtgaaactgaatcctggcgaagcgatgttcctgtttgccgaaaccccgcacgcctacctgcagggcgtcgcgctggaagtgatggccaactcagataacgtactgcgcgccggtctgacgccgaagtacatcgatatcccggaactggtggcaaacgtgaagtttgtcgccaaaccggccgctgagctgctgaccaagccggtacaacacggcagcgagctggatttcccaatcccggtcgacgatttcgcattctcgttgcacgatctgaccagcaatgaagcctctctggcgcaagagagcgccgcgattctgttctgcgtggaaggcgaagcaacgctgcgtaaaggcgaacagcgtctgaccctgcagccgggtgaatcggcgtttatcgcctgcaacgaatcaccggtacaggtcagcggccagggtcgtctggcgcgcgtgttcaataagcttaagtaagttactgaacttttaatccgcagttgctagacttcccccatcatgacaacaccaccaggcggcatgttccgcctggtttcatttatggacaaatgctatgaaaaaaacattggtcgctgcgggagttatcgtcgcgctcggcgtcgtctggacaggcggggcctggtttaccggtaagcaactggaaaaccgtattgccgaaatggtgcagcaggcgaatgcccaactacagagcaacgcgccggaagctggcgtagagctgagctatcaggactaccagcgcgggttattcagcagccacctgcaattggtggtgaagccgcaggccggtaaagaccacagcctgttggccgccggtcagagcctgatttttgacgaaaaggtcgatcatggtcccttcccgcttgcctcgttaaaatcttttaacctggtaccggcaatggcctcggtcaacaccactctggtgaataacgatgccagcaaagcgctgtttgatatcgccaaagggcagtcgccgtttaacatcgacacccgtattgcctacagcggcgatacccagtcggccatcttccttaacccgctggattacgctaaagacaatgaaaaagttatctttagcggcggtcagttccagctcaatgccgatcgcgatggcaaaacgatcagcctgagcggcgaagcggccagcgggcagatcaacgcggtcaacgaatacaaccagaaagtccagctcagttttagcaacctgaaggctgacggcgccaccgaaatgaccgccttcgaagaacgtatcggcaagcagaagatttcccttgataaactggctatcggcgttgaaggtaaagagctggcgctgctggaaggcatgaatatcgacggccgctcgacgctctccgatgacggcaaacgtatcaatagccagcttgattacaaccttaacagcctgaaactgcaaaaccaggatatgggccgcggcaaactcaccgttaagctggataatctcgacggtcaggcgtggcatcaattcagtcagcagtataacgcccaggcgcaggcgctgatggcgaagcccgagctggcgcagaatccggagctctatcagcaggcgttaaccgagatcttctttagctcgctgccgattctgttgaaaggtaatccgtcgctgacgatttccccgctgagctggcaaaacgctaaaggcgaaagcaccctgaatctgtcggtgctgatgcaggacccggcgcaaacgaccgccgcgccgcagaccgtcgccgatgaactggaccgcagcgttaaatcgctggacggtaagctggtgatcccagtggatatggccaccgctctgatgacgcagattgccgggctggaaggctatcagccggaggatgcggcgaaacttgccgatcagcaggttaaagggctggcggcgatgggacagatgttccgtctgaccacgatggaagataacgcgattacctccagcctgcagtacgccgacggccaggtaacgctaaacgggcagaaaatgccgctggctgatttcgccgccatgttcggcctgacgctccccaccgccgaaccgcagcagtaaaaaacgtcccgggctgcggtcaggtagcccgggaatcaccttaatcgatggcggcccctactttctgataaccagccgcggcggcataatctgattacgcgcgctgccttgcccctcctcgaggcggcgtaaaatacactccgccaggctgttccccatctcacgcgcgggggtagtcacccaggtcaaggggacatcatcgagcgccgcttccggcacttcggcaaaggccgccagcgcgatgcgttgctcaaaataactttccacgctaccctcgccgctctgccgcccggcgcgcagcagaccaaaccacgccccggtggcgatgacgctgttatagcaaagtaccgcgctgatggtcgggttttgccgcagcagcgcgatcatggcttccgccgcctgctgctgactggagccacactcgacaacccattcactatgaaacggcaggccgtacttcaataaggtggcgcaatagccgcccacccgttcggcgcgggtcaaggacgcgctttgtccgccaagccaggcgatgcgctgatgaccgcggcgaatcagatgttccgttaccatttgcgccgcctgcatgttatccgggcggatcaggtcaatatcgtccagatagctggcgcgggaggcaaaaaccagcggcatccccacttcggcggcacgatcgcgcagttcgccgcccttgtcgatagcgccagcgataatcaccccgtccacgccctgtgagaccagggtttcgaagcgctgaagcattttctcaccgcgatgcccgccctgggtgagaaataccattttaccctgtgattccagcgcatcggtcaacccggcggttagctcggcataaaacggcttcaacagatcgctaacgataaggccaattaccccgctttgcccgccgcggagcgacgccgcctggcgattacgcacaaacccgagctgctcaatggcctgattgacgcgctcgccggtggccgaagagatgcgccctttaccgctgagcaccagcgataccgtactgaccgagacgccagccgccagcgccacatcattgatggttgtcttttttgcgatagccataacgactggctgactccctttgcctttcgataaaacgttttatcagtatgttatctttataaaccttattatcgcttgattatgtgatttttatcgcactaaaaaatggtaaaacgttttatcttgccgctacgttacatcctatcgacccttttcagaaccaggattcgtgtatgacggcgaaaacagcacctaaaattaccttatgggagtttttccagcagttaggaaaaacctttatgttgcccgtggcgttgctctcgttttgcgggatcatgctggggatcggcagctcgttaagcagccacgatgtgattacgctgctgccgtggctgaacgtgccgctgctgcaggcgatttttgtctggatgagtaaagtcggctccttcgcttttagcttcctgccggtcatgttctgtatcgcaattccgctcggcctggcgcgtgaaaacaaaggcgtcgccgctttcgcgggctttgtcggctacgcggtaatgaacctcgcggtcaacttctggttgacggcgaaaggcatcctgccgaccaccgacgcggcgatcctcaaggccaacaacatccagaatattatcggtattcagtcgatcgacaccgggatcctcggggcggtgatcgccgggattatcgtctggatgctgcacgaacgcttccacaacatccgtctgccggatgcgctggccttctttggcggcacgcgctttgtgccgatcgttaccaccgtggtgttaggcctggtcgggctggtcattccgctggtgtggccggtgttcgcgatgggtatcaacggactgggccacgttatcaatagcgccggcgattttggcccgatgatcttcggtaccggagaacgcctgctgctgccgttcggcctgcatcatattctggtggcgctgatccgctttaccgaagcgggcggcaccatggacgtttgcggccacagcgttagcggcgcgctgaccatcttccaggcgcagctgagttgcccgacgacgcacggcttctctgaaagtgcgacccgcttcctgtcgcagggtaaaatgcccgccttcctcggcggcctgcccggcgcggcgctggcgatgtaccactgcgctcgtccggaaaaccgtcataaaattaaagggctgctcatttccggcgtcattgcctgcgtggtcggcggtaccactgagccattggaattcctgttcctgttcgtcgcgccggtactgtacgtcatccacgccctgctgaccggccttggtttcacaatcatggcggtacttggcgtcaccatcggcaacaccgacggcaacattatcgacttcgtggtgtttggcatcctgcacggtctggcgaccaagtggtatatggtgccggttgtcgccgccatctggttcgcggtgtactacggtatcatccgtttcgccatcacccgcttcaatctgaaaacgccgggccgcgatatcgaaacggcggctaacatcgaaaaagcggttgccggaacgattggcaaatcaggttataacgtgccggcgattctggccgcgctcggcggtgctgataatattgtcacgctcgataactgtattacccgcctgcgcctgtcggtgaacgacatgagcaaagtcgataccgccgcgttaaaagccaaccgcgcaatcggcgtggtccagcttaacgatcacaacctgcaggtggtcatcggcccacaggttcagtcggtaaaagatgaaatggccaccctgatgaataccgttcaggcctaaacatacgccccctctcacccggagggggctctcgcgaaggacgttcagatgtttgattttgccacaccagttgaccgccacgggacctggtgcacccaatgggactatgttgccgaccgtttcggcgccgccgacctgctgccgttcactatctccgatatggatttcgctaccgccccttgcattatcgacgccgtcagccagcgactggcgcacggcgtttttggctatagccgctggaaaaatgacgagtttctcggcgccatcagccactggttcgccagccgttttcatagccccattgaccacgaggccatcgtttacggcccgtcggttatctatatggtggccgaaatgattaggcaatggtccaattcgggcgacggcatcgtggtccataccccggcttacgacgcgttttacaaaactatcgacggcaaccagcgccgcattgccccggtggcgctcaagcttgatgagggtgagtggcgctgcgacatgaacgaactggaagccgcgctcgcccgtcccgacaaccgcattttgctgctatgcagcccgcataacccgacgggcaaagtctggagccgcgacgaactgaccaccatggcgcagctgtgcgcgaagcataacgtccgggttattagcgatgaaattcatatggatatgacctggggcgaacaccgtcataccccctggtgcgccgttgcgcagggcccctgggcgctgttcacgtcgggctcaaaaagcttcaatatcccggcatttaccggcgcctatgggctcatcgccgatactgcttcgcgcgatggctatctgcaagcgctgaaaggtcgcgatggtctctcatcaccttcggttccggcgctggtcgcgcatatcgccgcctatcgtcagggcgcgccctggctggatgcgttacgcgattatctgcaggaaaacatgcgctatatcgccgggcagctgaatcaggccttcccgcagctacgctggcagccgccgcaggccacctatctggcatggatcgatctgcgcccgctcggcgtcgacgaccgtgcgctgcaacgcgcgctaattgaagagcaaaaagtcgcgattatgccgggttatacctatggcgaagagggtaatggtttcatcaggctaaatgccggctgcccgcgggagaagcttgagaaaggggtgcaaggattgattgccgctctgcggtcattacgccctgacttaaaataattttgatatatctcaaaacttttttaaccacggaggagtattaaaacagcgctgaactatcacgtccgaatgacaatgcagaggaggaaatgatgaaaacctacgatcgtaaccgtaatgctattgatgccggcagccgggtcatggtggccgacagcggcgcgacgggagtgattaaggccattcatggcgctaataaaaacagcgaacagctgcgccgcagtaactgcgtagaattagacggtagtcatgaattgtattgcccattgaatcttattcgcctgggctttaattaattccggcgttgttgatttaaggccgccctgactggcggcctttttcatgaggcattcttcccgcttttgatctcgtcgagtgattctcaaagctaagcggcgtattatcgcggctcttcacgccctttcggggcgaattaccttctgagttcagaggcatttctatgacatggcaacaattcaaacaagcctggttaatcaaattttgggcgcctgcgcccgcggtgatcgccgccggtattctttctacttactattttggcattaccggtactttctgggcagtcaccggcgaatttacccgctggggcggccaactactgcagttgatgggcatcccggccgaaaactggggttactatcaattaatccatctcgaaggcacgccgttaacgcgtatcgacggtatgatgatccttggcatgtttggcggctgcctggccgccgcgctgtgggcgaataacgtcaagttgcggatgccgcgtagccgcatccgcattttccaggccctggccggcgggattattgccggcttcggcgcccggctggcaatgggctgtaatctggcggccttctttaccgggatcccacagttttccctgcacgcatggttcttcgccatcgccaccgccatcgggacctggttcggcgcgcgctttacgctgctgcctgttttccgtatcccggtcaaaattgagaaagtctccgcggcctcaccgttaactcaaaaacccgcgcaggcccgccgccgctttcgtctgggaatgctggtatttttcgctatgatcggttgggggctactgacagccgccaatcagcctaaattgggtctggccctgctgttcggcgttgcttttggcctgctcatcgaacgggcgcaaatctgtttcacctccgcctttcgcgatatgtgggtgaccgggcgcacctatatggcgaaagcgatcatcttcgggatggcggccagcgccatcggtatctttagctatgtacagctcggcatggagcccaaaatcatgtgggccgggccgaacgcggtgattggcggcctgctgttcggtttcggcatcgtgctggccggtggctgtgaaaccggctggatgtatcgcgccgttgaaggtcaggttcattattggtgggtcgggttaggcaacgttatcggctccaccctgctggcttacttctgggatgatttatcgccggcgcttgccacccactgggataagattaacctgctgacgacctttggtccgttcggcggcctgcttatcacctacctgctgctatttatcgcgctgatgttggtcatcgcctgggaaaaacacttctttcgccagaaaaacacttcggcgacccgtattaaggaaaccgcatgaaagagatcgttcctgattaccgcctcgatatggttggtgaaccttgcccctacccggccgtggccacgcttgaagcgatgccggcactcaaaaaaggggaaatacttgaagtggtgagcgactgtccgcagtcaatcaacaacatcccgcacgatgctaaaaatcacggctataccgtgctggatattcagcaggatgggccgacgatccgctatctgattcaaaaatgacgcgaagggccggtagcgcgctaccggctgtcattacttgcccgccatccagcgccgataacgtttagcctgccgttttgctgtcagttgcgccgtcagcagcgcccacagcggtgagacctgtggccgcaccgcgcggtggcggcttagccgctgcagctgatatttcaccgccgccatatgcgcggtggcggcaatagccttgttcttccagttaccctgacgcagcagtggcgcatcatactccccctcacgccagtactgcggcaagccggggactatcgccattgccgtagcgatgcccaccaacgcaatcccgctattcactaccctctccgccacttcacgccgccgcacgccgccggtaaccattaaaggaatcgtcgcgacgtcggcaatttgctcggcaaactgcaggaaataggcttcccgcgccagcgtccgttcatcgcgcatggcgcccatcatcgccggcgcttcgtagctgccgccggaaagttcgaccagatcgacgccgctttccgccagcagttgcaccaccgtcttcgcatcgttaatcgaaaagccgccgcgctggaaatctgctgaattgagtttaaccaccacggtaaaacccgccgccaccgtctcgcgaacgccgcgcacaatatccagcagtaaacgggcgcgattttcaatgctcccgccataccgatcggtgcgctggttactgagcggcgagaggaactggctcagcaaatagccgtgggcggcatggatttcgacgccgtgaaatccggcgcgctccgctaaccgggatgtggtgatgaaccgtcgtgtcacgtcggcgatatccttatcattcatcgcccgcggcaggcgaaagcgtgaagactgcgagccaagatccagcgccagcgccgaaggggccagcgtctcctgcccaaggccaccgggcatctgccgcccaggatggtttatctgcatccacacctgtgcacccttcgatcgcgccgcctgcgaccaggcgcggaacttatccagatgccgttcatcttccagcaccacgcctgccgggccggtcatcgcccgggcgtccaccatcacattaccggtaataatcaccccggcgccgccctgcgcccaggcctgataaagggtgagtaattccgttgacggcgcatgatcggcatcggccatattttcttccatcgccgctttagcgatgcggttgttaatgaccacgccagaggccagtcgcagaggagtaaagagggtcatgtcagggctccagtcagtgaactggacaaaccataaccttaaagttaagtttaaggtcaagcagcttatgaggaataaaaatgaacatcggaactctggcaaaacgcagcggcctggcgccttcgcggatccgttattacgagcgcgcggggatcctcaaaaccgtgcagcgtaaagccaatggctatcgcagctatccggaagaaacgctggtggtgctggggctaattaccaccgctcaggcagcgggtttcagcctcgaagagatatcatccctgttgccgtcagacctcaatcactgggatcgacaaacgctactcaccaccctgcaacaaaaagtcgcggatatcgaaaagctggaacagaaactcgcgcacagtaaagcgcaactggtcaacgttatccatgagatacaacagaagccggatgacattgactgcgccgcgaatgcgcggcgcgtattaactgaggtgctggatgtacagcaccagacggggaaggaagaataactaccagcctttcaccgcatcgcctttatacaattcgtcggcggcgttggcgacttcgtcggtctggtaggctttcaccagattcttcactttttcgctgtctttattatcttcgcggctggcgaaaatattgacgtacggcgaatttttatcctcgatgaacagaccattgcacgtcggcgacaggccaatctggctggagaacgtggtatttatgatagccatggtcacctgtttatcatccagcgcacgggtcagctgcggtgcttcaatctcgacgattttcagcttcttcgggttattcacgatatccagcgcggttggcagcaggccaaccccctctttcagagtgatcagcccctgctgctccagcaataacagagaacgcccaaggttggttgggtcattaggcaccgctacctgggcgccgtccggaagctgtgaaatggcggtgattttctttgaataagcggcaatcggatagacaaaagtagtaccaacatctaccagcttatagccgcgctcctggatctgtttatcaagatagggtttatgctggaaagcattgatatcgagatcgccattattcagcgcctcattgggcagaacgaaatcattaaaagtcaccacttcaacatcaaggttatatttctgtttagcgactttttgcaccaccgcccagacttgctgatcgatacccgcgctaatccccaccttaatatgattaggatcctgatcttttggcccacagcccgctagcagcaacgcgctaacgagggccaatgaatgagttaaacctttaagtgaaaaagccattttcccggcgtccttttaatatagcctgctaacgatggcaggaatgtcagtccgggacactatataaaagcatctttctaagattaaatactgattcactatgactaatagcgaaacgctattgataagtcgccacgctgcttatactcacccgccagtggaactgctgatttcttgcgctaaagcaatactttgtaacacttgaaacactgttccaataccattacacacattaaaattaagattatattattagcattataataaatagataagtgaacgtttcgtatacatcagctgtataggaagccgtttcgcacgcacacacgacccacaaggaaaatcatggagcttctggatttgctcaggaccatttttgagcgagtacgcactgatgcggattttatttcatttactgaagtacttctggagaacaatgtctcttattacatctattttgtcgctacagggaatgtgaattttgttatgtcatcagatactttcgtttccctgaaaagcaacagaaagttgttgcgggttaattcccagtcctgcagagcgctcacccgagatgccgcccggcgccactttagcggtattaccacttttgataactattgcgccgaactggcaaatgccggggtattcaagtgggtggttgatctcaatgaaaaaacgcgacactactggtcaaaagacaatacgttattgcatatggaaaatatgattctccccttttaatcgcagaaattattaaacgctcatccagatattcagacggcccggaagttagtttacgcttggggccgctcaacacctcaatttgcgcaacaaaaaagggaaatggctttctatttgcgcaaaaacagactttgcaccagccatctccctgtatccataggattttttccgtacttttaaacggttacgctactgatgtataatatcgtgcacttcaactaaaaaatgagtgcgaccatgattgattcagctttgcctttaacagacattcaccgccatcttgacggcaacatccgtgcccaaaccattctcgatcttggccgccagttcaatattactctcccggcagatacccttgaaacgctgcgtccgcatgtgcaggtcaccagcaatgaaccagacctggttagcttcctggcgaaacttgattggggcgtgaaggtgctggcttctctggaagcctgccgccgtgttgcctgggaaaacgttgaagacgccgcgcgcaacggcctgcactacgttgaactgcgtttttctccgcgttatatggcgatgacccatcaattaccggtcgctggcgtcgtcgaagcggtgattgccggggtacgcgagggctgccgtgatttcggcgtcgaagcgcgtctgattggcatcatgagccgcaccttcggcgaagcggcctgtgaagaggaactcgacgccctgctggcccatcgcgatgggatcaccgcgctggatctggcgggcgacgagctgggattccccggcgcgctgtttatggatcatttccgtcgcgcgcgtgacgcgggttggcgtatcaccgtccacgctggtgaagccgccgggccggaaagtatctggcaggccattcgtgaactgggcgccgaacgcatcggtcacggggtgaaagccgtgcaggatccgaagttaatggacttcctcgccgctgaacgtattggcattgaatcctgcctgacgtcgaacatccagaccagtaccgtctcctcactggcgcagcacccgctgaagaccttcctcgatcacggcgtgctggcctgcattaacaccgatgatccggcggtacagggggtggatattattcacgagtacaatgtcgccgcaccggcggcgggcctcagccgtgagcagatccgtcaggcgcaaattaacggtctggaactggcattcctcagccgtcaggaaaaagaggcgctgatccaacgcgtgctgcaggctaattaagccaaagctccgccgcgcaggcggagcatgctgttaaaacaggcacagcgccgcccggtgccgtgccgattcaatccctaattcaatcagctccataatctgaatcgcctggcttgcaggtaccggattttccccgctgccgttgagcgcatcgcggatcgccgcataataagcgggatagttcccgggcagcgttagccaggattcctcgacgcgctcctcgccttcaacgcgggtcaatatgccgtcgcgcatatcgtagccccaatcctcctgcggcagtcgctcgccgcttttcaatcgctcttcctgcggatcgagaccgtattttacatagcttcctcgtgaaccatggacgatataacgcgccgtttccgccgccgccagcagcgtactgtgcaaaatcactctccgttgcggataaactaacaccgcgtggaaataatccgtcgcctgcgcaccggggcgctgctgcgccagatcgacggcaatacttaccggtaggccaaacaggttgaccgcctgatccagcagatgggggcctaagtcataccagataccgctgccagggccaccctgctcacgccagcggtcacgaacctgcgggcgaaaacgatcgaaatgtgattcaaaataactgacctcccccaaatcccctgcagcaatcaaggccttcagcgtgagaaaatcgctatcccaacggcgattatggaacaccgataacagccgcccgcggcttctggcgatagcatccaactcacgcgcctgtgacagtgtcacggtaaaaggtttgtcaacaatgacatgtttgcccgcctccagcgccgctcgcgccagcgggaaatgagtatcgttgggagttggaataacaatcagatcgatatcagggtcagcgtatagcgaattcgcggaagtcaccacctgggtcgccggccagtccgccagcactttctgcgcatcgctactgaccacggtcgtcagggccatgcccggcgtaccggaaatcaatggcgcgtgaaatgtcttgcttgcataaccataacctatcagccctacccgtatagcatcactcatgacctcatcctcgtacgcaaccatgacttcaactataaaccgcaatcttccgcttatccgtgcacgctgtttatctttgcgccagttgcgcaatctacgggcggtaatacttgcgttgtttccgcggtttagtaacatttcaatccattttaactttccgctttagaattatgacgactgtttttacccgcattgtagaacttattggctgggttgtttttggcgtttcggctgtgctgttggtggttgcgcatcaaattgatgattaccagtccccgcctccggccagcactgtacaggcgaaataacggcaaagagtgatgctcgccgcaaatctgcaaccggtttcagaaaccggttgcagatttgtcgcgccattcaatacactctctttatcacttgataaggagtttttttgatggccgcatttccgcaagattttctctggggggcagcaacggccgcctaccaggttgaaggcgggcacgatgccgatggcaaaggcccttctatttgggatatctactcgcaccagccgggaaccacctttcagggcaccaatggcgatatcgccgtcgatcactatcaccgctttcgtgaagatgtcgccctgatggctgaaatggggctccaaagctaccgcttttctatctcctggcctcggttattgcctcgtggccgtggcgaagtcaatgaaccaggcgtgcagttttacagcgatctgatcgacgaactgctggcgcacaatattgaaccgatgatcaccctttatcactgggatttgccccaggcattgcaggacgaagggggttgggaggctcgcagcacagcggaagccttcgccgaatacgcgcgactgtgctatcagcgcttcggttccagggtcaagctgtgggcaacctttaacgaaaccattgtatttattggccacggttatattaatggctgccatccaccggcggtacgcgacccggctcgcgccatccaggcttgtcaccatgtctttatcgcccacgcgctggccgttaagaccttccgtgacatgaacattaacggccagattggtttcgttaacgtactgcagccccatacgccgttgacgcaaagcgccgaggacattgaggccaccgcgttggccgatgctatccatacccactggctatacgatccggtactcaaaggcgcctatccagacgctttacttcaacaggctcaggcgctgtggaacgtaccgcgcttcgcaccgggcgacgacgcgctgctcaaggaaaaccgctgcgattttatcggcctgaattattatcgtcgggagacggtctccgccacgccgcaggatggtccaggcgttggcgagtccggcgtggatggattattttattttgtccgcaatccgcaaagtacttataccgaatggggttgggaaatttggccgcagggattaaccgacggcatcatgatgataaaagagcgttacggcgatatcccaatctatatcaccgaaaatggtttgggggcgaaagatccgattattgacggtgaaatagtcgacgatccgcgaattgactatttgagtagccacattaatgcgctggaaaaggcaatagcattaggtgcggatgtccgcggtttttacccatggtcctttattgacctgctaagctggctcaacggctatcagaagcagtatggctttgtctacgtcgatcaccagcagaaccgcgctcgcaaacgaaaaaagagttatttctggtatcaaaacgttattgccagccgaggcgaacagcgttaatcttccctcccaggcgccgtccggcgcctgatctggttgtagaatattcttaaatttctttttacgatgccaggatcctaatcagttcttgtttttagtattggcaaccgaaataattccgccggcccatcaagaaggcgctgttagttgaaacacggtttacagaaaattggtaatattcgacttaattccgattattaaatggatacacaaatgaccgtacaggattatttattaaaattccgcaaaattagttcgctggaaagcctggaaaaactttttgatcatcttaactattctctctctgacaccaatgaaatcgtcaacatgtatcgcgccgccgatcaccgccgcgccgagttagtctctggtggaaaactgttcgatgtaggccaggtgccgaagtcggtgtggcgttacgtgcaataaagactgttatcattcacgccagttgcttatacttcccgccctgaaattaactaactggcgttgaatccgggggttaggatgtcctctcaatctgcagaacgtatcggcggatggctactggcgccgctggcgtggttactgctcgcgttgctcagcacctccttatcattaatactgtacgcgaatgcgctgatggcgccgcagacctgggcattgctgaaagccatgagctttggccatctggcgctctggctggcttcgctgctgttcgccgtcgcgatgtggtattataccctgtggctgacgatagcgtttttcaaacgccgcgcggtggtacccaaacactacattatctggctgcttatttctctgctgctggcgattaaggcgttcgctttttcgccgatttcggatcttctggccatgcgccagctgctgtttccgttgctcgctgcggcactgtttgcgccctattttcgacgctctgcgcgggttaagcggaccttcgtcaatccgtaataaccacacagttcacctgttgtcgccggtatcgatttattcgataataggcggctttttttcgtttcaggtccaataatggctgattatttactgctctttgtcggtactgtccttgttaataacttcgtgctggtgaagtttcttggattgtgcccgtttatgggggtttccaaaaagctggaaaccgctatggggatgggactggccactacctttgtgatgacgctggcctcaatttgcgcctggttgattgatacctggatccttatcccgctgaaccttgtttatctgcgcaccctggcctttatcctggtcatcgcggtggtggtgcaatttaccgagatggtggtacgtaaaaccagtccggcgctgtatcgcctgctggggatcttcctgccgttaatcaccaccaactgcgcggtgctgggcgtggcattgctgaatattaacctcgggcataatttcctgcagtccgcgctgtacggtttcgccgccgccgttggtttctcgctggtgatggtgttattcgccgcgattcgcgaacgtctggtggttgccgatgttcccgcgccgtttcgcggtaacgcgattgcgctggtgaccgctggattaatgtcgctggcatttatgggctttagtggtttggtgaagttgtaatgagcgctgtctggatagccgtgatcgccatcagcctgctcgggctgattttcggcttaatactggggtacgcgtcgcgccgttttgcggtggaagacgacccggtggtagaaaaaattgatgagttgctgccgcaaagtcaatgcggccagtgcggctttcctggctgccgtccctacgcggaagccgtgggcactcagggtgaaaaaatcaaccgctgcgcccccggcggtgaagcggtcatgttaaaaatcgccgcattattgaacgtcgacccgcagcctattgacggcgatgagcagcagcaagagccggttcgcatgttggcggtgattgatgaagccaactgcattggctgcaccaaatgtattcaggcctgcccggttgatgccatcgttggcgcgacccgcgccatgcatacggtgatgagcgacctgtgcaccggctgtaatctctgcgttgccccctgcccgactcagtgtattgacctgcgtccagtcgctcagaccaccgaaacctggaaatgggacctgcaggccatcccggtacgcaatattcctgtggaacaacatgtttaagttattttccgctttccgaaaagacaagatctgggacttcaacggcggtattcatccgccggaaatgaaaactcagtccaacggcacgccgctgcgtcaggttcctctgccgcagcgttttgtcattccgctgaagcagcatatcggtgctgaaggcgaactgtgcgtacaaccgggcgacaaagttttgcgcggtcagccgttaacccgcggctttggcaggatgctgccggttcatgccccgacttccggaacggtgacggctattgccccccattccaccgcccacccttccgcgctggcggaactcagcgttattatcgacgccgatggcgaagactgctggatcgagcgcgacggctggagcgactaccacaacaagtcgcgtgaagagctgatcgagcgtattcaccagtttggcgtcgccggactcggcggcgccggcttccccacgggaacaaaactgcgcggcggcggcgataaaatcgataccctgattatcaatgctgcagaatgcgaaccctatatcaccgcagacgatcgcctgatgcaggattgcgcggcgcaggttgttgaagggatccgcatccttgcgcatattctgcaacccaaacaggtgctgattggtatcgaagataacaaaccgcaggccatttcgatgctgcgcgcggtgttatccgatgcccacggcatagcgctgcgggtgattccaaccaaatatccctccggcggcgcgaagcaacttacgcaaattctcactggtaagcaggtgccgcatggcggccgctcctccgatattggcgtcctgatgcagaacgttggcaccgcttatgctgttaaacgcgcggtgatcgacggcgagccgttaaccgagcgcgtcgtcacgttgactggcgaagcgattagccggccgggcaacgtttgggcgcgcctgggtacgccggtgcgccatcttctgagcgatgccggtttctgcgccagcgcagagccgatggtcatcatgggcggcccgttgatgggcttcactctgccctggctcgacgttccggtcgtgaaaatcactaactgtctgctggctccgtcggtaactgagatgggcgaaacgcaggaagagcaaggctgtatccgctgtagcgcctgcgctgatgcctgcccggcagatctcctcccccagcagctgtattggttcagtaaaggccagcagcacgacaaagccactacccataacttagccgactgcatcgaatgcggcgcctgcgcctgggtctgtccgagtaatattccgctggtgcaatatttccgccaggaaaaagcggaaattgccgccatccgtcaggaagaacagcgcgccgccgaggcgaaagctcggtttgaagcgcgacaggcgcgtcttgaacgtgaaaaagccgcgcgccaggagcggcacaaaaaagcagccgtacaaccggcggcgaaagatcaggatgccattaacgccgcgttggcccgcgtgcgtgataagcagcgtgatgcggcgcagccgattgtcattcaatccggcagcaaaccagacaacagcgaagcgattgccgcccgcgaagcgcgtaaagccgaggccagggcgcgcaaagctgaacagcaagccgctgttgaatcgacaaccgatgcaagcgatccgcgtaaagccgccgttgaggccgctatcgcccgcgccaaagcgcgtaaagccgcacagcaggttgaaaacgccgctccctctgccgaaagtgaaaccaccgctgaagctgcgcccgcggtcgatccgcgtaaagccgccgttgaggccgctatcgctcgcgccaaagcgcgcaaagccgcgcagcagggtgaaaacgccgctccctctgccgaaagtgaaaccacggctgaagctgcgccagcggtcgatccgcgtaaagccgccgttgaggccgctatcgctcgcgccaaagcgcgtaaagccgcgcagcaggttgaaaacgccgctccctctgccgaaagtgaaaccacggttgagacagcgcccgcggtcgatccgcgtaaagccgccgttgaggccgctatcgcccgcgccaaggcgcgtaaagccgcccaacaagcagaacaacaaaccgcgccggacgccgccaatgacgatccgcgtaaagcggccgtcgcggcagctatcgctcgcgttcaggcacgtaaagcaacacagcaggcagttaacgaggaataaatggttttcagaatcgcaagctccccttatacccacaaccagcgccagacctcgcgaattatgctcctggtgctgctggcggcgatccctggcattgccgtccagagctggtttttcggctggggtaccctgttgcagattatcctcgcggccttcaccgcatggggaaccgaagcggctattctcaagttgcgcaaacagaatatcgcggcaacccttgcggataactctgccctgctgaccgggctgttgttggccgtgagtattccgccgctggcgccgtggtggatggtggtgttgggcaccgcctttgcggtggtgattgccaagcaactgtacggcggattaggacataacccctttaacccggcaatgatcggctatgtcgttctgctaatctctttcccggtgcagatgacctcctggttaccgccgcacgaaattgccgctcaggttcctggctttatggatgcgctgcaggtcattttcagcggccataccgctagcggcggcgatatgaacagcctgcgcatgggaatcgacggtatcagccaggccacgccgctggatacatttaagacttcgcttcatgccgggcacagcgcaaaagagatcctgcaatatccaatttacggcggccaactggctggccttggctggcaatgggttaacctcgcctggctggctggcggtctgttcctgctttggcaaaaaaccattcgctggcatatcccggtgagcttcctgctaagccttgccgtctgcgccactctcggctggattttctcgccggaaagcctggcatcgccgcaaatgcatctgctttccggcgccaccatgctcggggcgttctttatccttaccgatccggtgacggcatccaccaccaaccgcggacgcctgattttcggcgcgctggcaggtttactggtgtggctgatccgcagcttcggcggttatccggacggcgtcgcctttgccgtgctgctggcgaatataaccgtcccattgattgactactacacgcgtccgcgcgtgtatggccaccgttaaggagtcgtcatgttaaaaagcatgcgtaaacacggcatcacgctggcgctctttgccgctggctctaccggactaacggccgccatcaatgagttaaccaaaaacaccattgagcagcaggccgcgctgcagcaaaaggccctgttcgatcaggtcctgccagcggagagttataataacgacctgctgcaaagctgttatctggtgaccgcgccgcagttaggcaaaggtcagcataaagtatggattgcaaagctgaacgatgcgccggtcggcgcggtgatggaagccacggcgccagatggttattccggggcgattcaactgctggtagcagccgactttaaaggcaccgttctcggttcacgtgtcaccgagcatcatgaaacacccgggctcggtgataagatcgaactgcgtatttctgactggatcacccacttcagcggcaaggttatccatggtcaaaatgatagccactgggcggtgaaaaaagacggtggcgatttcgaccaattcaccggcgcgaccattaccccgcgcgcggtggtaaatgccgttaaacgcgcgggtctgtatgcgcaaacgctgcccgcgcagatccctgaattcaccgcctgcggagactaagccatgagcgaagtaaaagacgtcattgttcaagggttgtggaagaataactcggcgctggttcagctgttgggtatgtgtcccctgcttgcggttacctcaacggctaccaatgccctgggcctcggcctggcgaccacgctggtactgacgctaaccaacctcaccatctccagcctgcgccgctggacgccggcggagatccgtattccgatctacgtgatgatcatcgcctcggtagtcagcgtggtacaaatgcttatcaacgcctacgctttcggcctgtatcaatcgctgggtatcttcattccgcttatcgtcaccaactgtatcgtggtggggcgcgccgaagcgttcgccgccaaaaaagggccggcgctgtcggcgctcgatggtttttccattggtatgggcgcgacctgtgccatgtttgtgctggggtcgctgcgcgaaataatcggcaatggcacactgtttgatggcgccgatagcttattaggcagttgggcgaaagtcctgcgcatcgaagttttccataccgatacgccgttcctgctggcgatgctaccgccgggcgctttcattggcctcggtatgatgctggcggtaaaatacctcattgatgagcgtactaagcagcgtaaggcgaaagcggcgcaggccgtctccgtcgccccaactgatgtgacagggaaagcgtaagatgaataaagccaaacgcctggagatcctgaccaggctgcgggacaacgacccgcacccaatgaccgaactcaatttcacctcaccgttcgagctacttatagcggtgctgctgtcggcgcaggccaccgatgtgagcgtcaacaaagcgacggcgaagctctatccggtcgccaatacgccggcggcgatgctggagcttggcgttgacggcgtgaagtcctatatcaagaccattggtctgtttaacagtaaagccgaaaacgtcatcaaaacctgccgcatcttactggagaaacataacggtgaggtgccagaggaccgggcggcgctggaagcgctaccaggagtcggacgtaaaaccgctaatgtcgtgctgaataccgcctttggctggccgactatcgccgtcgacacccatatcttccgcgtttgcaatcggacacaatttgctcccggcaagaacgttgaacaagtcgaagaaaagttgttaaaggtggtgccggcggagtttaaagttgactgccaccactggcttattcttcacggccgttacacttgcatcgcgcgaaaaccgcgctgtggttcctgcctgattgaagatttgtgcgagtataaagagaaggtagagtcctgatttctgcatatcatgtgaatatgaccgctccccccccgtagtcgcctttttcatcgtcgccagcctggagccataacctaacctgtggttatggctctatgttttaccagccacaccgataatcactccatagttttgccatttagatggataattatgcggttatataacgaacgatcagcgcattcgttttttaccgtcgaaaattttctatgtatttgtgatcaagatcatccatgcaactcatcgttaaataactgttgcgaaaatgatgcaaaaagccagcaatttcaatatcagagccttagacaacaggacaatagcctgcttatttttcggaatataggccatcccactaccttcaaggtcaaaaagcagaatatatcgcctttatcccctcagtagccgcccgccacagattaaaatatcaggtttaacgaataggtgaaatttaactctgtataacatttgcatgactggctaattatagtggcttagttatgtgtaacagagtattacaaagctattgcctgatggggcaggatagtgaacattacttgccgttttccctccaagaataactataaaggcggcggtccttcgcgattgcgccccaaacagcccccgttaatatgggatgtaaaaaaagaggtatatgtgtcaactgcaaacaataaaccagcagaaagcgtgagtctgaacgctttcaaacaaccaagagcgttttatctcatcttctccattgagttatgggagcgttttggttattacggcctgcaagggatcatggccgtttacctggtaaaacagctgggtatgtcggaagcggattctatcaccctgttctcttcctttagtgcactggtttatggcctggtcgctatcggcggatggctcggcgacaaggtacttggcaccaaacgcgtcatcatgcttggcgcgattgtcctggctatcggctatgcgctggttgcctggtccggtcacgatgccgccatcgtctatatgggtatggcgactatcgccgtcggtaacggcctgttcaaagctaacccgtcctccctgctctctacctgctacgacaagaacgacccgcgtctggacggtgcattcaccatgtactacatgtccgtcaatatcggttccttcttctctatgctggctacaccgtggctggcagcgaagttcggctggagcgtggcgttcgcgctgagcgtcgtgggcatgctgattaccgtggttaactttgccttctgccagaagtgggtcaaacagtacggttccaaacctgacttcgcaccggtgcatgtcggcaaactgctggcgactatcgtcggcgtagtcgtgctggtcgcgattgccacctggctgctgcacaaccagggcatcgcacgtatggcgctgggcgtcatcgcactgggtattgttatcatcttcgctaaagaagccatggcgctgcagggcgcggcgcgtcgtaaaatgatcgttgctttcctgctgatggttgaagcgattgtcttcttcgtactgtacagccagatgccaacctcgctgaacttcttcgcgatccgtaacgttgagcactcgattctgggtatcgcgttcgaaccggagcagtatcaggcgttgaacccgttctggattatgattggtagcccgattctggcggcgatttataacaagatgggtgaccgcctgccgatgccgcataaattcgccatcggtatggtactgtgctccggcgctttcctggtgctgccgctgggtaccaaattcgccagcgatgctggtatcgtctccgtcaactggttgatcctcagctacgcgctgcagagtatcggcgaactgatgatttccggcctcggcctggcgatggtggctcaactggtaccgcaacgtctgatgggcttcatcatgggtagctggttcctgaccaccgcaggcgccgccatcattgcaggtaaaatcgctaacctgatggcagtaccggaaaacgtgaccgacccgctggtttctctggatgtttacggccacgtgttcctgcagattggtatcgcgaccgcagtcatcgccttcctgatgctgctgaccgcgccgaagctgaaccgcatgactcttgacgacgacgctgtcgccaaagcgcgcgaaaccgcaaccgcttaaatgctccgggaaaaccaataaatttaggccgctaacgtttgttagcggctttttttttgtccctgggcggactaacatacagaaaactgcagccacgaggagttactgatgaaactgttctacaagcccggcgcctgttcccttgcctctcatatcgccctgcgcgaaagcggcctcgactttaccatcgatagcgtcgacctggcgaagaaacgcctcgaaaatggcgatgactacctgctgattaaccctaagggtcaggttcccgcgctgctgcttgacgacgaagtgctgctgaccgagggcgtggccatcatgcagtacattgccgaccgcgtacctgaccgtcagctgctggcgccagtgggtaccattgcccgctaccagacgctggaatggctgaattacgtcgccaccgaattacataaaggcttcaccccgctgttccgcccggatacgccggatgactacaagccaacggtgcgtgccctgctggagaaaaagctgcagtatgtcgatgaggcgctgaaagataaacagtggctgaatgggcatcgctttaccatagctgatggctatctgttcacggtactgcgctggggctatgcggtgaaactgaatatggaagcgtacgcaaatattggcgcctggatggcgcatgtcgcggcgcgtccgtccgttgcggcggcgctgtcggcggaaggtctgaagtaaaccattggcatgcccgcaagcgggcatgccatcgcgcttacagttgcgtagcgctgaagtaatgctccggtttggcgatgcggtcctgtgccgccaccacctgcagttcatactcctgcatatttttggttgccaacatgatttcatacactgccgcagtgacgtgctcaagggcatcgcgcaggctggcgccctgcagtagcttaaccagcagcaggccgctggtcacatcgcccacgccgaccggctgacggctgccaaaatcgaccagcgggcgactgatatgccaggcttcatccgctgtcaccagcaacatctcaaagcgatccatactcatccccgcccgcgccagatgcttcaccagcacgacctgcggcccttgcgctatcagctcacgcgctgcgctaacggcttcatcaacgttagcaaccggatggccgcacaggatctccagctcgacaagattcggcgcgataatatcgctggccggcagcgcatagcgtacgtggaattcagccaccccaggggcgacgatacagcctttttccgggtggcccatcaccggatcgcaaaaatatttcgctgccggattcgccgctttaacctgacgcacgatgccgagaatatgttcgccctgctcggcggaacccagatagccgctcagtaccgcatcacagctctgcagcttatcgatgtcggcaatcccctgcacgatttcggtcaaatgcgaaggcggcatgacgcagccggtccatttgccgtactgcgtatggttggagaactgaacggtattgaggggccagacgttggcgccgagacggcgcatcggaaattcagcggcgctgttgcccgcatggccaaacacaacgtgagactgaatggcgaggatgttcttcattttcttaccacaaccctaaaaagaaaaagggcgtggtttcccacgccctggttttattttttatttccagcagatcaggcagtaattcttcttaccgcgacgcagtaaggtatagcggccgaacaggcggtcgctatcgctgaatacatattccggatcggactgcttttcaccgttaatggtcaccgcgttggaggctacggttttacgcgcctggccgcgggacggctgcagctcggaatctaccagcgcttgcagaagatcggcgcccttttccatttcgatcatcggcacgccgtcttgcgccagctgttcaaaatccgcttcgctcagatcgctcagattgccgttgaacaggctttcagtaatacgtttcgctgcttccaggccttcttcgccgtggaccagacgcgtcacctgctctgccagcacgtactgcgcgcgcggcgctttaccgctgttcttatcttcttcttccagcgcattgatctctgcaatgtccatgaaggtgaagaacttcaggaagcgataaacgtccgcatccgcggtgttgatccagaactggtagaatttgtacgggctggttttcttcggatccagccataccgcgccgccttcggttttaccgaacttggtgccatcggccttggtgatcagcggaacggtcaaaccgaagacctgattctggtgcaaacgacgggtcaggtcgataccagatgtgatgttgccccactggtcggagccgccgatttgtagcgccacgccgtgcagtttattcaggcaggcaaagtcataaccctgcagcaggttataggaaaactcggtgaaagagataccctgatcgtcacggttcagacgctgcttcaccgcttctttgttgatcatctggttcacagagaagtgcttaccgatgtcacgcaggaaggtcagcacgttcatgccgccgaaccagtcgtagttattcgcggcaatcgccgagttgtcgccgcagttgaaatcgaggaatggcgcaacctgtttacggattttgtccacccactgctgcacggtatcttcggtattgagtttacgctcagcggctttgaagctcgggtcgccaattagaccggtcgcgccgcccaccagcgccacaggcttgtggcctgcctgctggaagcgtttcaggcataacaatggaacaagatgccccaagtgcaagctgtcagcggtaggatcgaagccgcaatagagcgcgatcgggccttgcgccagtcgctctgctaacgcttcttcgtccgtcacctgggctaccagcccccgctcttgcaattgtttaatcaagttactgcttgccatcaaattctccatgtataaacgactgcacctttgccggtacacgacttttcgccagacgcgaaaggtacatagaataaagcgccggagcacgtagcaccagcgcttaaaacaacattttgcgtcctttatggcgccagacggtcgatttgccagccatcattttgccgctggtataaaaagcggtcgtgtagacgatgttcgccgccctgccagaactccatctgttcgatgctgacgcggaagccaccccagaaactcggcaacggcacttcgccttgctggaatttctgtttcagctcaaggaatttactttccaggatcccacgcgcggagatacggctggactgttgggagacccaggcgccgatctggctatcgcgcggccggctgtggaaatacttaaccacttccagcgtcgacagacgctctgcctgaccgattaccatcacctgccgctccagcatatgccagggaaacagcaggctgatatggggatttttttcgatttgatgtgctttgcgactacccaggttggtataaaacaccagccctttttcgtcatagtgctttaacaatacgatgcgttgatagggctggccgttttcatcaacggtcgcgaccaccattgccgtcgggtcggcaagcttagcgtcgcaggcctgacgcaaccaacgttcaaataacgtcaggggttcagcgggaagatcgtggcgacgaaggccgccacgggtgtattcacggcgcagatgcgcgatttgctgcaattcgtcgttgtcagacataaccattgagatcgttgtcatagggtggcgttattgtgcgcccccgctacggaaatctcaacgtttcgcggtctgcaactggcagttgtccagtacgacgcggtcgcgcttataaacggtggcgctgtcgcccttcgaccagaagacataaacgccatcagtataacgagccccggaagccgagagcccctgggtcaggtttaattgttgattatcatagataaagcttacctgctgacgcgcgttgttcagatggacggtcaacggtttttgatcgcactgatattcaagggtgtcggtctgcatccgttcaacgaattggttgtaatagctacaccccgccagcatgaaaggaactaccgcaataagaatttttttcatgagtatgccttcgactttcccggtcaggagagcaaaccgccctcccggaatttcgtccagtttaccggtaaataaaaaatagcgacttcagttaactctgattctgcgctcgattcgcgggatagatggcaccaagaatggtcgcttcgctggcgccggtaacggaaggaagattacccggcaggccagcaagcgtacgccatgccagccacgcaaaggccaacgcttccatatcgtcgccgctgatgccggcgtcatcggtggtcgtgacttcagtacctggcagcagcgccgccagacgcgccatcaacagcggatttcgcgccccgccgccgcaaactaacaaacgctcgcagccgccgcttaacaaaacctgctcactgatggtcactgcggtcagttctgtcagcgtagcctgaacatcctgccctcgcagattggcgtagcgcgccagatgtttttccagccaaccataattgaaatactcgcgaccggtgctcttcggcgcgggtaacgcgaaccacgggtcgcttagcatatcctgcagcagcggtagcaagactttgccttcactggcccattgcgcgtctttatcgtagggtttaccacactggcgccagatccaggcgtccatcagcatattccccggcccggtgtcgtaaccgcgtaccggctgccccggaaccagcaaggaaaggttggctatgccgccgatgttaagcaccatgcgcctttcaaccgggtgcgccaacagagcctgatggaaggcagggactaacggcgcgccctggccgccaagcgccatatcgcgacggcggaaatcccccaccacggtcacgccggtatgcgctgcgatctgattgttatcgcctatttgcatcgtgtgcggcgcatcgccggtcggctcatgccacaccgtctggccatggcaaccgatagcgacgatatcctcaggttgaagattctgctggcgcatcagcgctaatactgcgtcagaaaatagccggcccaaacgggtatcgagtcgccccagttgcgataaggtcagctgctgcccctggcaaatcgctaaaatatcttctttcagattgaccgggatggggtacgagaggctcgcctgctgcgccactatgttttcatttattgccgccagaacaacatcaacgccatcaaggctggtgccagacattacgccaataaaacgacctgatttcatacgcctaccctcattccatgacttttgcagtaccatcagtgcatcataaagcagcgttcaatgctatggcgcactaatactttttaacaatagttctgccgcaagaatttgttaggtaaagtacttacgtttatccgtcgttaaagcgaaccttattatttttaaacggtccataaggaagctatgccagcgaacgcttaaatgccatataattgaccacatggaagttcactggaacattttggtacacaggagattcatagatgattttacgtgttttggctgtctcgatgattggcttaaccctggcgggttgcgtcagcagcagtggcctatccggcgatgtttacacagcctcagaagccaagcaggtgcaaagcgtgacctacggtaccatcgtacatacccgtgcggtccagatccaaagcggcgatgacagcaatgccatcggcgcgattggcggcgcggtactcggtggcttccttggtaataccatcggcggcggtactggtcgttctcttgcaaccgctgcaggcgcggttgccggtggcgtagccggtcagggcgtacagggcgcgatgaacaaaacgcagggcgttgagctggaaatccgtaaagatgacggtaacaccatcatggtagttcagaaacagggtaacaccccattctccgtcggccagcgcgtagccattgccggcagcggcagtcaagtgacggtttccccgcgttaagcctctctaatgcggcctttattggccgcattaatccctcataattattatttagctccaaataatttatcatacatatatcaattttattgatatttctccgcgacaacttgcgtttgcgcaatatttcccgttgattaattcgttagcctgaagtggtctttctcatttagcgacctgcacgtcgtttttatccgcccttttatcgcgggagtttgcctgtgcctctgaaactaaaccggttatcacaccgcttatttgcttatattattgcctgcagcctggcaattattacgatcgatttattatctaattcagttgttaatcgtatccctacgacttcatcaccacttttccctttactgacaataatattaatgatttttcacattactatttcttgttttatgagcatgaagtattggtgtgataaaaaccgcctgtatctgatgcccatcgccttcgcttttgccagctctgccctgttgatgctgggcaccctgagcagctatcccggctggctactgtgcaacagcgaatatattgttaaacaaaatgacgcgctgatcttttattcgttccgcaatattctgatggccgtgttatttatcactgccattataatatatcgttttcgccaacatcttaaccaggctgctggcgcacatgctataatattgacggtatgctttctattcagtgccgccattcttattttatcctggctacactccagtaatagtccgttattaagcatcgattttatcgacgatatcaccagcacttttactccgttatggcattactggatgggctggctgctatttttagcctgggtatgtacgttgatattattgattatgctaacccggctacgtaatatcttctggtacagcggcgcatttatctgtgccgcctatatatttacgctaaacgtattactcacagcgacaggtagtcagcatattatcgcctggaatcaggcgcgcctgttcgaaaccttaagtaccttatttatgctgttcgtcctgttaagcgacgtttttcttctctatcgcgactctaacaacaaatacatcaattcatatcagaactctatccgtgacccgttaaccgggctgtacaaccgcagctacttttacgacacgctgaatggactattgccgcatacttcagcagcacaaccgctttccgtcatcgtcagcgatctcgatcactttaagcgtatcaacgacaactacggtcatgtccagggtgacaaggtgattcagtttgccgccagcgtattacaaacctatgtccgtcgtgaggatattgccgcgcgcatcggcggcgaagagtttgccctgttgttggtaaatactgatgctgatgatgcgctggcgatagccgagcgaattcgccagatggtcagcgccgggcaggattcactgccggaacaaatgaccattagtatgggtgtctacacggcgacaagctcgctcattgaggctgaagagtgcgttaagcgcgcggatacggctatgtacgcggcgaaaaacggtggccgcaatcgcgtggtggtctggcagaataaataattgaaagggctctgcaagcgcagagccctgttcctggctagtctttagcctgaagatcgaggatattgttttcaagtttacggattaagttgagcagcgtttcgacttcctgctttgatacacctgcaaggatttcatcacgcgttttgccgatcacgtcttccatttggttgatcagcggttcagccttttccgttagcttgatacgtttcgcccggcgatcgtttgcacaagtctggcgagaaataagccctttctcctccagttgatccagcgtgcgcaccaaagagggctgttcaataccaattgccttggccaactggatttgcgactgctcaggaggtagctgatgtatgttatgcagcgtgacccagtgcgtctgcgttaactccagaggtttcaggcgatggtcgatcagcgcgcgccaaacgcgtaccaaacgtgccagatcagaaccaagtggcgattccaatttcatctccttataattagcttgctaagttattatactgcttttagaatagtgtgcagcatttaaattaccaaaacaaatgaattacttgattcactaaattcaaaacaatgatttacaatgtgaactaattcatcaccaagaacattatccctgcaacggcaaaggatttttgcttgtgaaactgagtcttaacactcccggattgtcgctacaggacctggtgttcggcgcttctatctattttcccccgttatttaaagccgtcgtgcttggtttctttatttggctaatagttcatcgtcagttgcgcgactggatgtacgccggcgaaatctggcatcccctgctgatggacctttccctgtttgcgctggccgtttgcctggcgctggttctcctgactctcttgtgatactcatttcatgaagaaactaaaatatctctcaaccttaattatcgccgcctgcgcaatcatcgccgcctggctggtctggaactactacactcagtcgccatggacccgcgacggtaaaatccgcgccgaacaagtcggcatcaccccgcaggtctccggcagtattttgcagttgaatgttaaagataaccaattggtcaacgccggcgacgtgctgttccgtattgacgatacgccttatcgcattgcggtattaaacgctcaggcgcagttggcaaaagccaaagcggaactggcaaaagccaaagccgagcaaaccaaggccgccagcgacgttactcgccgccgcagtctgtcgcaaaacttcatctccgctgaagatatggaaaccgtcaataccgcgctgaataccgccaatacgacttatgaggcggctaaagcggtcgttggcgtggcgcaagccgcgctggagcatgcgcagtggcagctgtcgcaaaccgtggttaaagccccggttgatggctggataactaatttgtcaacgcgggtcggggactatgcctccgtcggccatcccgtatttgcccttgtcgacagccactctttctatgtcctgggttattttgaagagaccaaactacgtcacatccgcgaaggtgatagcgcccaggtcgttctttacagcagcaaacaaacgttacagggtcacgtttccagcattggccgcgctatcgtcgaccagagtgtcgaaggcggttcggcgttggtcgctaatattaaacccaatattccgtgggtgcgcctcgcgcaacgtgtaccggtacgtatcgagttcgataaattgcctgcggatgtcacattggtttcaggtaccacctgtaccgtgtcaattggcggacaataatgaagctgcaggctctgcgctggcaatcactgccgtggtttaaagccagccgcccgcaatggcgctacgcattgcgcaatgggatagccatgtgtctggcgcttagcatcgcctatgcgctggatcttgatgagccctactgggcaatgacctcagccgcagtcgtgagcttcccgaccgtcggcggcgttatcagtaagagttttggccgtatcgccggcagcctgctcggcgcctgcgccgccctgctacttgcgggccatacccttaacgacccgtggctattcttattcagtatctcagcctggattgcgctctgtacctgggcctgcgcgatgtttaccaataacgtcgcctacgcttttcaactggcgggctatacctgcgcaatcatcgccttcccggttataaatgttaccgacgcgaatgaactgtggactatcgctcagtcgcgggtctgtgaagtgattgtggggatattgtccggcggattcatgatgatgatcctgcccagtacctcagatggcgtcacactgctgacggcgttgaagaatatgcactcacggttattagagcatgccagcctgctgtgggtgccggaaaccaccgatgcgattcgtagcgctcatgaaagcgtcatcggtcagatcctgactatgaatctactgcgtatccaggccttctggagccattatcgtttcagacggcagaaccccttgctgaattatctgctgcatcagcagttgcgaatgaccagcgtcatctccagcctacggcgaatgttattgaactggccggatgcgcctggtaatacgcgggcggtgctggaaacgttacttagcgagctcgccaatccgcacgcaaatgtttatagcgtggcgcgaattctggtgccgctagcccccggccctaacgccgactatcgccatctggcgttctggaaacggctgcgttatttctgtcgtatctatctcgaaagcagccgctggatccgccgcatcgagaacgccagcgctatcacggtgttcaatgtcccttcggcgcccgcgctgtcgcgccataccgatcaggcggaagcgttatggaacggcttacggaccttctgcgcgctggtggccgtgggcgcctggggtatcagcacccaatggcaggcctgcgccgccgcgctcaccctcgccgccattagctgcgtactctactcgatatcgccttcgccctttaaatcgctcaccttattgatgcgtacgctggtgctgttgtcgctgttcagctttgtggtgaagtttggcctaatggtgcagataaccgacctgtggcagtttttactgtttctcttcccgctgctcaccaccatgcagttattgaaactccagatgccgaagttcgcagggctgtgggggcagttaatcgtctttatgggatcgtttatttcggtcaccaaccctccggtttacgattttgcctcgttccttaatgataacctcggcaaaatcattggtgtcggtcttgcgtggcttgcctttgcgattatcagccccggctcggatgcgcggaaaagccgccgccatattcgtgcgttacggcgtcactttgtcgatcagttgagccgacgcccgcagcacagcgagcatgaatttgagtcactggtgtaccaccacattagccagttaagcagcagccaggacgcactggcgcgacgttggctgctgcgctggggcgtggtgctgctcaactgctcgcatgtcgtgtggcaactacgtgattgggagacacgctccgatccgctttcacaagtgcgcgacttgtgtattagcctgctacgcgacgtcatgagcgaacgcggcgtccagcaacgcccacttgcctcgacgttgctggaactgcagcggatttgcgacacccttaatcaccatcatcagccggcggctaaagagctggcggcgattatctggcggttatactgctctctatcgcaattagaacaagcgccgattgccggcaccattaccgaacggactacttaatcaccccgcaggcaaaacgctcgccgccgccgcccagcggctgcgggctatcggccatattatcgcctccgacatgcaccatcagcgctttgcccttcacttccgcgagcgttttcaggcgcggggcaataaccggttggttagccacgccatcgtcgttcaccaccagcaaaggaagatcaccaagatgccctgcccctaatggcccttcatgtttgccggtatgttgtgggtcgaaatgaccgcccgccgcgccagcggcgaccgccttaccgtcttttatcgccggttggcagctcccttctgcgtggatatgaaagccgtgtttgcccggcggaagcgcgcgtaaatcaggcgtaaactcaagacccctgtcggtttcagtgattttaacgctgccgacggcctggccaacgctctggctggtgacaagattaagggagacatcttcactggcggcctgagcgccagcgcaaaatgcgagagtgaaaatagcgagtaaacatcgttgcataacacctccggattagccgtatccctgataagtgtaaaccaggtagcggcatccggaggcgtaatctggcttacgggacgtcgtaacccagcgccgctttacgaatgcggaaccactgctggcgcgtcatatgcagtttttccgccacaatagctgagcgcacgcgctcgattttccccgagccaataatcggcagcggtttcgacggcaagcgcaatacccaggcgtaaaccacctgttcaatgctttctgcgttaagctcctgggcgatttgcgccagctcgtcgcgcagcggctggaagctttcgtcgttgaacaggcgtccgccgccgaggcacgaccaggccatcggacggatacgcaactgctggagttgatcgagggtgccgtccagcagcagcggctgatgtaccggcgagagctcgacctggttagtggccagggtgaaaggcaggcgcgattgtaaaagcgtaaactgcgccggcgtaaagttagataccccaaagtggcgcactttcccactatgatgtaacgcgaggaaagcctcagcgacctcatcggcatccatcagtggatccgggcggtgaatcagcagtaaatcgagatgatcggtcgccagattacgcagggattgctcggcgctgagaataatatggtcgcgatcagtaatatagtggccaatagtattttccgcgcgcgccttggtcgcaataccgcatttgctgacgatttccatacgcttacgcaggtgcggggcgcgtttaagcgcttcgccaaacgcggcttcacactgataatcgccgtagatatcggcgtggtcgacggtcgtaacccccagatccaggtgctgctcaataaagccaaccaaagcgtcggtggacatcttccagtccatgagacgccagtagcccattacaaaacgtgaaaattccggcccttgcggagccatagcaatacgctgaaccataaacgcttcctcgacaaaaaagtgttctgagtatacgcatatttgtcgtcaaaacagtgagggttgctgcggttcttccgccggctcctgcttagtcgcgcgaattttacgcagtaaacgctggcggcacagacgtagaacctcctgcttttgcgcgtcggtcagcttttgccagttaaagcgctcatcccggctacgaaaacagccgcggcaatacccgcgttcgtcggactgacaaactccccggcacggactttgtaccgggaaaaactccagctgctctgccaccaccgctctcctgtattttctctctgtctctcattgaagacgttccaccgccagtgcgcaacttttgttgtcttcgtattcgcgctaacgatcattttgcttgcattagaccaatcggtctactacagtgtgctccatgaacagacacagcgaatgcgatacccgagaacacatcctcatcaccggcgagcaactatgcatgcatcgtggttttaccggcatgggcttaagtgaacttctgaaaacggcggaagtgccgaaaggctctttctatcactactttcgctcaaaagaagccttcggcgtcgcgctgcttgaacatcactacaccggctatctgcagcgcctggttgatcactttgaccatggcgaaggcaactaccgcgaccgactgctggcctactatcagcacacgctgaatcagttttgccaacagggcattatcagcggttgcttaaccgtgaagctgtcggcggaggtgtgcgacctgtcggaagatatgcgtaccgccatggataaaggcgccagccagattatcgccctattgggcgaagcgctggaaaagggccgtctggagggtagcctgttgtttgagggggaagctatcaccctttcacaggtgctgtactcgttgtggttgggagccaatttacaggccaaaattacgcgtagcgcaacgccgctggaaagcgcccttgctcacgccaaacaaatcattgcagcgcctgcggtttaacaggcgttttatttaaccagttacaagacgaccggtctactcaggagtcattatgtcagaatctaaattgttcagcccgttaaaagtcggtgcggtgaccgtacctaaccgcgtatttatggctccgctgacccgtctgcgcagcatcgaaccaggtgacatccctactccgctgatggctgagtactatcgtcagcgcgccagctccggcctgattatcaccgaagcgacgcaaatttccgcccaggcgaaaggctatgccggcgcgccgggcctgcatagcgcagagcaaatggccgcatggcaaaaaatcactgctggcgttcatgctgaaaacggtcatatcgccgtgcaactgtggcacaccgggcgtatttcccataacagcctgcagccgggaggcgcggcgccggttgcgccatcggcgctgagcgcaggtacgcgtacttcgctgcgtgatgaaaacggtcatgccattcgcgtcgatacgtcgatgccgcgcgcgctggaaacagacgaaatcccagggatcgtggatgacttccgtcaggcggtaggcaatgcccgcgatgtcggcttcgacctggtagagctgcactccgcgcatggctatctgctacaccagttcctgtcgccttcttctaaccagcgtaccgaccagtacggcggcagcgttgagaatcgcgcccgcctggtgctggaagtggtcgatgccgtcagtaaagagtggagcgccgatcgtatcggcattcgcgtgtcgccaatcggtagtttccagaacgtcgataacggcccgaacgaagaagccgatgcgctctatcttattgagcagctggcaaaacgcggtatcgcttatctgcacatgtccgaaccagactgggccggcggccagccgtacagcgacgaattccgtcagaaagttcgcgatcgcttcccgggcgcgattatcggcgctggcgcctatacggtggagaaagccaacgaccttatcaataaaggactgatcgatgccgtggcctttggccgcgattacatcgctaacccggatctggtggcgcgtctgcagaagaaagcggcgcttaacccgcagcgcccggaaagcttctacggcggcggcgcggaaggttataccgattatccaaccctgtaatccctccattgatagcggcgtaccaacgccgctatactcaagactctgatgtatcaaaacaaactgcataggggaaattatgcgcttacttcacaccatgctgcgcgttggcgacctgcaacgttctattgagttttacaccaacgtgctgggcatgaagctgctgcgtaccagcgaaaaccctgaatataaatactcgctggctttcgtcggctacggcgaagagagcgataccgcggttatcgaactgacctataactggggcgtggatagctacgaactcggtaccgcctatggccatattgcgctgagcgtcgacaacgcggcgcaagcgtgcgagcgtattcgccagaatggcggcaatatcactcgcgaagctggcccggttaaaggcggcagcacggttatcgcctttgttgaagatccggacggctacaaaattgagctgatcgaagagaaagatgccggaaaaggtctcggcaactaagttaattcgggcgcgttcgcgcccgatgttttctcccttcctgctgcaagccgcggcaaaatttgccataatgcgcgctacttttttccagctaagagaatctgatgtccgagaacgctcaacttaatggtctgtgcggccgttttcgcggtttttatcctgtggtaattgatgttgaaaccgccgggtttaatgccaaaaccgacgccctgctggagatcgccgctattacgttgaagatggatgagcagggctggctgatgccggacgaaacgctgcattttcacgtggctcccttcgaaggggccaacctgcagccggaagcgctggctttcaatggaattaacccaaacgatccggagcgcggcgcgataagtgaatacgatgcgctgcacgccatttttaaaatggttcgcaaaggaatgaaagagagcgattgtagccgcgcgattatggtggcgcataacgcgactttcgatcacagctttacgatggccgccgccgagcgcgccgggttgaaacgcaacccgttccatcctttcgtgaccttcgataccgccgcgttgagcgggttggccttagggcaaacggtattgtctaaagcctgcatcgccgccggcatggagtttgatggcagcaaggcccattctgcgttgtacgataccgagcaaaccgcccagctattctgcgaaatcgtcaaccgctggaagcgccttggcggctggccgttacctgtacctgaagcgtaagcgataaaaaaagcgacttccggagaagtcgctttttcttttgcagcaaagaattactctgctttcggctcgtcagcgttgtgctttgcagccgtttctttgatcagctgctgcagttcgccgcgctgatacatttcgatgatgatgtcgcaaccgccaaccagttcaccgtcaacccacagctgcgggaaggtcggccagttagcgtatttcggcagttcagcgcggatatccgggttctgcaggatatcaacgtaggcaaaacgttcgccgcaagcagaaagcgcctgcactgcctgagcggagaaaccgcagctcggcagcttcggagagcctttcatgtacagcaggatcgggttttcagcgatttgacgttggatcgtttctagagtggtgctcattgtcgtgcttccttaaacatctttacggcagtaatttgtcattgtagcgtcctggacgcaggaccgataataacatttttttcactcgccacattttatcttctgtcgtctgaagttgccttaaaaatatcactttgtaacgtcaccgcggggcgagttgcgcactttctgtacgaggaggtgattgtctgactcatttttttgcaatcgttaaccaaacgacattttagatacaaaagagtattaactttctggctttttatgctttagaatcattccggtttgtcattcaccgtcaggcattagtatatgtctgtaatttaatcaggggattgctcagtggcgcggctcaataaaatcgcgatatcgctctgtgcattactgtttacatctatctcgcttacgccattggcgcatgcttcagggcatacgcacgcttcggctacgccgaaggcgcacccggcgaaaggctccaccgccgagcgtaagaagaaagcaacgcaaaataaatccaaatccaccactaaaactacccgtaaaaaaacctcaagcgcgaagtcccctactcgtactaccgcagcaagccaaaccgcgcttaatcgtcaagtcgccggcgccactaaaaaatgcgtgttgcgtaaaggctataaaaagcagtgtgcgaaaacggtaaaatccagcgaagcatcgacgctggcgttgaacagcgtgaaaagcaaatgcgtggtgcgtaaaggctacaaaaaacgttgtaaacctgtcgctgatgaaccgaatctgacgattgccgatgcgcacaaagcccgagtgcaaaaagcgcaaagcactgccatgaataaactcatggatcagctaggcaaaccttatcgctggggaggctcctcaccgcgtaccggtttcgactgcagcgggctggtttattacgcctataaagatctggtaaaaattcatattccgcgcaccgctaacgaaatgtaccacctgcgcgatgcccgcccggttgaccgcgatgaactgcaaagcggcgatctggtcttcttccgcacccgcggacgcggcaccgccgaccacgtaggcgtttacgttggaaacggtaagtttatccagtcgccgcgtaccggccgtgatattcagataacctccctgagcgaagattattgggttcgccactacgtcggcgcgcgccgcgtaatgacgccaaaaaccattcgttaagaggcacagaccccggtttgccgctgcgccggcaaaccgctcttctgtacattcccctcctcttccagattcagcggatactgcattcgctcctccagttgcgcggggtgacggcggtagctggtcggcgacataccaaaatgacgacggaaagtacggcaaaatgtcgcctggccttcaaacccgagcagcaatgagatactcaacgccgaatcctgcgtctgtttgagaataccggcggcaatggtcattttgcgtcggctaacatatgttcccagcgtataaccggtaatcagcgcgaactggcgctgaaagtaccagtgcgaataacccgatttccttgagattgcggtgacgggtagcgcggtaaagatgttgtcttcgatccactcgatgatatctatgacgatcggaataatatgtccgctgaccatttcatgtttatgcgccatctcttctcatccatcaattatgagctttatgcttgttcaataaggatttcttactccgaggtccgttgcctgcagagacaattatatttgtcatacaattaaaattaatcctaatgattattgggcatgaaagtcattcccattacgcattatgctcgcaagctaatgttttatatcgatctaaaaagataacaggtgatgaagatacgcagcgttttagtcgtaggcaggagcgtcgatggggaatttgcgaatcatatcgctcgccatgcgccagactggcgaaggcttaatcagtcgcgttagcaataaataacctttgttgttgtaagtcttttaactgacttcagcaaatgttaacattctcaacacaataacatgtaacactcgcgacagcgttacacagtaaatacgatattcaggtgaacattcacctaattaatgtgagaaaaaacaaaaagttataaggagagtagcaatgtcgttcgaattacctgcattaccatatgcaaaagacgccctggcgccgcacatttccgcagaaaccctggaataccattacggtaaacatcaccaggcctacgtgaccaacctcaacaacctgatcaaaggcaccgcttttgaaggcaaatctctggaagagatcgttcgctcttctgaaggcggcgttttcaataacgcagcgcaggtctggaaccacactttctactggaactgcctggcgcctaacgccggcggtgagccggaaggcgaactggccgcagcgattaacaaatctttcggtagcttcgctgattttaaagcgaaattcaccgatgccgcggcgaaaaacttcggcgcaggctggacctggcttgttaaaaacgctgacggcagcctggctatcgtctccaccagcaacgccggcactccgctgactaccgatgcgacgccgctgttgaccgttgatgtctgggaacacgcctactacatcgactaccgcaatgcccgtcctaattatctggaacacttctgggcgctggtaaactggaaatttgttgccgccaacctggcagcataaaaataaaaccgcagcagggttaccccgctgcggttttttcttagtgcgacttagttattcgctaacgcttcttctggttgtgaacgcccgccaaacagcaccaccgctaatgccagcccggcaataatcgcccccatcaccggcacaaaagcataaccgaggccgccggatatcaccgcgccgcccgccgccgcgcccaacgcattaccgagattgaaagcgccaatgttaaccgacgatgacaggcccggcgcttcgtgcgccacgcgcattacgcgcatctgcagcggcggaaccaccgcaaaggttgccgcgccccacacgaccatgctgacggcagcacccagttgcgattgtgccagcagcggaatggccaacatgatggcaatcagtaacaacaggaaccctttcaacgttccggagactgaacggtcggcaaacttaccgcccagatagttgccaagcgagaaaccgacgccgattaataccagcatggcggtaacaaacagcggtgaagcgttggtaatggtatgcagtaccggagaaatgtaggtatacagcgtgaacatcgccccggcgcccagcacggtggttaacagcgcagagagtacctgaggacgcatcaacactgaaagctcgcgcttcacgttcggacgttcgccggcgctacccttcggcagggagaaccacaggctgaccatcgcaattaatcccagacccgccgtggcgaggaaagacattcgccaaccgatggtttcgccaagccaggtggcagccggtacgccgccgatattggcaatggtcagccccataaacatggtcgcgaccgcactggcctgtttgtgttttggcaccacgcttgcggcaacgaccgagccaaggccgaagaacgcgccatgattgaggctggtgataatacgcgacagcagtagcgtcgtgtaatccggcgcaatagaagagagcacgttgccgagggtgaagatccccatcaggaagatcaatgcattgcggcgagcgcgatgcgatagcagcaacgtcattaacggcgcgccgaccatcacgccaatggcataggcgctaatcagcatccccgcggccggaatagaaacatcgacgcctttggcgataaccggcagtaatcccatcggggaaaactcggtggtaccgataccaaaggcaccgatcgccaacgcgagtaagggaaagttgattttcattcagagactccatcaggccgattcaggacacggcattacatcagaagccaaaagcatgacatcaatcacagaaaaacagaagtaaacgaaatgacaaaagatttttgcagatttgctaataatggcgggatgggaggggaagccccctccctgctggaatcagtgcagtaccgcggtcaacgcggcggcgacgatcagacccaaaacaataaccgtcgttgtcagcgaaaactttaaatttgtgtccatcaattttctcccctgattatccccacatagaaagtgagcttgctcatttttgcacaaaaatatgcaaaaatcttcccggatttagagtgatgcacatttttgctcttcccctttgccgcgagataggacaaaatcccacgctaatttgaaagcgtatcggccattgaccccttcctgtcgttctgtgtcgttttcccaggtgttgcaatgttgagcattgtatacagggtgtgtataggcaaacgtttacgtatcgataatcagacgatcaggtcaaggtctggagtgagaagtaatggcaactattaaagatgtagcgaaacgcgcaaacgtttccactacaactgtatcacatgtgattaacaaaacccgtttcgtggcggaagagacgcgcaatgcggtgtgggcggcaattaaagaactccactattcgccaagcgccgtggctcgcagcctgaaagtcaatcacactaaatcgatcggtctgctggccaccagcagcgaagcggcctatttcgctgaaattatcgaatccgtagaaaagagctgcttccagaaaggctataccctgattctgggcaacgcctggaacgatccggaaaaacagcgcgcctacttgtcgatgatggcgcaaaagcgcgttgacggcctgctggtgatgtgttccgagtaccctgagtcggtgctcagtatgctcgaagagtatcgtcatattccgatggtggtgatggactggggcgaagccaaagcggactttaccgactcggttattgataatgcctttgaaggcggctatatcgccggccgttacctgattgaacgcggccatcgtgaaattggcgttattccgggcccgcttgagcgcaacaccggcgccgggcgccttgccggcttcatgcaggcgatgaaagaagcgcatatcaatgtgccggaaaactggattgttcagggcgactttgaaccggaatccggctaccgcgccatgcagcagatccttaatcagcagcatcgcccaaccgccgtgttctgcggcggcgacatcatggcgatgggcgctatctgcgccgccgacgaaatgggcctgcgcgtgccgcaggacatttcgctgatcggctatgataatgtgcgcaacgcccgctacttcagcccggcgctgaccacaatacatcaacccaaggactcactcggagaagcggcattcaatatgctgctcgatcgcattgttaataaacgcgaagagtcgcagtccatcgaggtgcatccacgtcttatcgagcgccgctcggttgccgacggcccgttcgtcgattatcgtcgttaacaccctcctccggcgccggttattccggcgcccgcaaccactcccgattcaacgtttcgctgtcgccaagatagtcaagcagccagcttaaagcgggtgaagcatcgctttgttgccaggtcaggcagcaggcggcatccgggaatgggttttccagcgtcaaggccgtccactccccgctatcgatatgcgggcgggcgaaatggcctggcaccatcccgacgcacaatcctgccgatagacaggtggctgaagattcccaatccggcaccaccacccgcttctggttatcaagcagccaggttgtgcgcttcggcagcgagcgcgaggtatcttcgcgcaccagggacggccagttgcgcaacacgtcatcactgagcggcccttccatctgcgccagcggatgactgctggcgacgacacagtgccagttcagcatccccatatcgcgaaaagcgtaacgccctcccaccggtatcgaacgcgtcgcgccgatagcgagttctacccgcccatcggctaacgcatcccagacgccgttgaaaacttcctgaaaaacgatcagttcgacatcgctaaaatggcgataaaaatcaacgatcatctggcgcatccgcgccggtttaacgatatcgtccaccgcaatggacagctggccgcgccagccgttagcaatttgctggcactgctggcgggtgatctgcatttttttgataacagaacgcccttcctgcaaaaaccagtgcccggcgggggtcaattcaacatcacgatggcgacgttcaaaaagcggaaccgccagccactcctccagctgtcgcaccgtatagctcaccgccgaaggtacgcggtgtagctcctgcgccgcggcgctgaaactcccgttacgcgccacagcatcaaccacttctaaggaatattcagaccacatattctgcctgcaaaatttttgaatgcatgtgacaaataatagcgtttcacaaggcggattacactccctacactctgcggcatcgtacctgcatcagtagaaagagaacgttatgcaacaacctgggaaaggatttttagtgtggctgggcggcctgagcgtgcttggctttctggccaccgacatgtatctaccggcctttgccgccattcagcaagacctcaacacctctgccgcatcggttagcgccagcttgagcttattcctcgcgggcttcgcgatcggccagctgttctgggggccgctgtcggaccgctatggtcggaaaccgattctgctcgccgggctggctatcttcgctcttggctgtcttgggatgctgtgggtacgcgatgcgacgctgatgctggtactgcgttttgtccaggcgattggcgtatgcgccgccgcggtgacctggcaggcgatggtgaccgactactatccggcccagcgcaccaaccgcattttcgcgacgatcatgccgctggtcgggctctctccggcgctggcgccgttactcggcagctggctgttagtccatctggaatggcaggctatcttcgccaccctgttcgctatcaccatactgttgatgctgccggcttttcgtctgaaggcggtcgtcaaacctgctggcgaaacccagcagaaaattacctttatgtccctgctgcgttcacgtgaatatagcggtaacgtgctcatttatgcggcgtgttccgccagcttcttcgcctggctcaccggttcgccatttatcctccatgaaatgggctatggtccgacggtgattggccttagctacgtgccgcaaactatcgccttcctgattggcggttacggctgccgcgcggcgctgcaaaaatggcagggtcatcagatgctgccctggctgctggttgtttttgcgctgagcgtagccgcgacctggcttgccggaatacaggatcatccgtcgctggttgcgttaatggttccgttttgcatcatggcgattgtgaatggcgggatttaccctatcgtcgtcgcccaggcgctgaaaccttttccacaggcaaccgggcgcgccgccgccctgcagaatacgctgcagcttggcctctgtttcctggcaagcctgctggtctcaagccttatcgccactccgcttctgaccaccaccagcgtgatgctgatttccatcgtcctggcaggcatcggtttctggatgcagcaacgacgcgtgcagttagtgaacgaatcgtctcacgcttgatgattttttaaaggatctcccggaccagtaattagcctgctaatatatttttattgaaaggcggtttttagcggcctatactggatccggcatcacataaatagaaagttttttagatattaacgggggcaggaagcagcccgtttcaccatggaaggcctttcggcaagggttatctcccttcctctgttctacgtcggatagcaccctcacgattttttcgtgagatttctcacaaagccaaaaaagcgtctacgctgttttaaggttctgatcacttgggcgtgatggagaagctatgagttcatcgtgtatagaagaagtaagtgtaccaaacgatgattggtaccggattgcagctgaattattgggccgtgccggaattgagatcaatggttccgcaccctccgatatccgggtaaaaaacccgctcttttttaaacgcgtgttacaagaagggtctctcggattaggcgaaagctatatggacggctggtgggaatgcgaacgcctggatatattctttcacaaggtattgcgcgccgggctggataagcaactcccccaccacttcaaagatacgctacgtatcgctggcgctcgcctgtttaatctgcaaagcaaaaaacgcgcctggattgttggtaaagaacactacgatttaggcaacgaccttttccaccgcatgctcgatccctatatgcaatattcctgcggatactggaaagaggccgaaaatctggaacaggcgcagcaggataaattagctcttatctgtcgcaaactgcagcttgagccaggaatgaaagtgctggatatcggttgcggttggggcggactggcctattacatggccaaaaactataacgtcagtgtgacgggcgtgaccatttcggccgaacaacaaaaaatggcacaggagcgctgtgcaggattagatgtcaatattctgctgcaggactatcgcgatcttcacgaaagttttgaccgaatcgtctccgtcgggatgttcgagcacgttgggcctaaaaattacgccacttattttgaagttgtcgatcgtaatttaaaaccaaacggtcgttttctgctacacaccattggttcaaagattaccgatcacaacgtcgacccgtggattaataaatatatattccctaacggttgcctgccgtcggtacgccatatcgccgatgccagcgagaagcattttgtgatggaagattggcataactttggtgccgattatgacaccaccttgatggcctggtacgagcgttttcttgccagttggccggatattgccgataactattcagatcgtttcaaacgcatgtttacctattatctgaatgcctgcgcgggtgctttccgcgcccgcgacattcagctctggcaagtcgtcttctcgcgcggtgttgaacatggcctgcgcgtagcccgctagactcgctaaaaaaagcccccgcagaaatacatttctacgggggcttttttattattcttccgcgcttttttgcgccgcttcttttgccgccagcacgcgttccacggtatccaccaccgcctgagtctgcggatcgatttcgatatttactttatcgccgagttttttcaccccaagcgtggtgcgctgcagcgtttccggaatcaggtgcacacagaaacgagtcggggtcacttcaccaaccgtcaggctaataccatccacgccgatgaaccctttatacaggatatatttcatcagcgccgggtcctgcaccttaaaccaaatctggcgattgttttccgaggtgaggattttaacgacttcggcggtggtcataatatggccggacatcaaatggccgccgatttcatcactgaatttcgccgctcgctcgacgttgaccatatcgccttcatggatagcgccaagattggtgatacgcagcgtctctttcatcaagtcaaagctgattcgcgggccgtcaatttcggtaacggtcaggcaacagccattgtgcgccaccgaagcaccggtctccaggccatcgagcatatgcgccggcagctccaccacgtgggtgcggaaattcggtttctcatcgatggacaccactttcgcagtcccctgtacaataccagtaaacatactttgctcctgttgagaatcgtgacggtatcattaccgttatatatacgcggaacaataacagttgaccaaacaggttgccagcgcgcatcgtgcccccaccattttttcactggcttaatggctaatcctcgctacaatagactggaaattcctcctgttttttcttcttgctgccattcaaggcggcttttttagtctcaaaataacaacaatataaaggtgttcacgtgcagaagtactttatagaagcgcgtcagttattagcattggctatcccggtcattctggcgcaggtcgcccagacggcgatgggctttgtcgatacggtgatggccggcggctacagcgcaaccgatatggccgccgtggctatcggcacctcgatctggctacctgccatcctgtttggccacggtctgctgctggcgctaacgccggttatcgcccaactcaatggctccggtcgccgcgatcgtatcgcccagcaggtacgccagggcttttggctggcgggctttgtctccgtactggtgatggtggtgctgtggaacgcaggctatatcatcagctcgatgcacaacatcgacccacagcttgccgacaaagcggtggggtatctgcgtgcgctgctatggggcgcgccaggctatctgttcttccaggtcgcgcgtaaccagtgcgaagggctggcaaaaactaagcccggtatggtgatgggttttatcggcctgctggtcaacattccagtgaactacatttttatctatggtcatttcggtatgccggaacttggcggcatcggctgcggggtcgcgaccgcctcggtctactgggtcatgtttgccagcatgctgacctgggtgcgccgcgcgcgctcaatgcgcgatatccgctgcgctgagcgtttcagtaaacctgatttttcggtattaaaacggctggtacagctggggttgccaatcgcgctggcgctgttttttgaagtcacgctgttcgcggttgtggcgctgctggtttcgccattggggattatcgatgtcgcagggcatcaaatcgcccttaacttcagttcgctgatgttcgttcttccgctctcgctggcggcggcggtaacaatacgcgttggttttcgtctcggccagggctcgacgctggatgcacagacctccgcgcgtaccggggtcggcgtgggcgtctgcatggcaatgatcaccgcgattttcacgatcctgatgcgtaagcagattgccctgctgtacaacgataaccctgaggtggtgctactggcctcacagctgatgctgctggcggcgatttatcagatttccgactccattcaggtgatcggcagcggtattctgcgcggttataaagatacgcggtcgatcttctttattaccttcaccgcttactgggtacttggcctgccaagcggttatctgctggcgctgacggatattgtggtgccgcggatggggcctgcgggcttctggtgcggctttatcatcggcctgacctccgctgccatcatgatgatgctgcgcatgcgcttcctgcaacgtcagccgtcaagcgtgatcctgcagcgcgccgcgcgttaaccagaaacgctaaagaaaagggcaagccgttaaaacggtttgccctttaatagcgctacttcgcaagccatttgcgctgcggcggcgtatagcgatggaatgcggttaaaatctcctgtacatcatcgctaaaagtcagcatctcagcatagcggcgatgcataaacccttcggcggccattttttccgccatcgcctgcagcgggttgtaatagccgttcacgttcaggaaagcacagggcttttcatgaataccgagctgcgcccaggtccactgttcaaaaatctcttccagcgttccggctccacccggcatggcaatgaagccgtccgccagcagcgacattttgtttttgcgctcatgcatattctcaacgacatgcagctcgcttaatccgctatgcgcaatctcacgctccaccagcccgcgcggcatcacgccaatgacccgcccgccgtgttctaatgcagcatctgccacggcgcccatgagtcctactttaccgccgccatacacaagctccaccccggcttgcgccagcgccttgccaacctgttgcgcgtaaacctgataaatcgggttttccccggtagaagaaccacaaaaaatgccaattgctttcattactgcgctccgtcgtttatttgccgcacactctagcataaagtcggtgagcgtctcccctgccaatccgggcagaaaaacgcaacggagcaggacattgttgaagaaatatcctttatcatcagtaaaatatgggcgatatggataaaagttctgcaaacgcgtctattctgcaagaaaagtgacgtttgcctcttgccacacggcctccctgccgttaatatgcgtccccgttgtcaccacaacattgcgttcatagctcagttggttagagcaccaccttgacatggtgggggtcgttggttcgagtccaattgaacgcaccattcgcgtttatagctcagttggttagagcaccaccttgacatggtgggggtcgttggttcgagtccaattaaacgcaccatatgcgtccgtagctcagttggttagagcaccaccttgacatggtgggggtcggtggttcgagtccactcggacgcaccatttcaatcattattgatttggtgcgcacttctcttctttcctcttgcttttatctataacgacatcagtcgctgtacctgaatactctccagtttcccctccagaatcgccagaaaatcgtcatgatacggcatcgcaacgtgctgttttagatcgtcttccgagcgccaacgctcaataaacacaaatgagatctttccttgccgggaaagctgcctgacatcagggatctcccggctttcgtgcaggtcatattgcaggcaccctgcttctctgtgcgtcggcggcaccatggctaatgccgcctctctgatggtatcgatatattcaggatagggggtcagcgtggcaacaattttgacttcactcataaggcttcctctggctcaccgtattcccctggaggctatatctatccagggcgtgaattattcagcgtagtggtgaagccagaattacgccagagtccgcgtcagcgccctttctcatacacggtcatggtaaagacgacgggcaactgactgaaattacaatattcatgtggcacatcggtacgtgctaccgcagaacacccttcagccacctgatatgggtcattattcaccgtcagggtgagttctccctcggtcacgtatagcagttcccaggtgtcggccggatgccccggcgaacggaacgattcgccaggcaacatccgccactgccagagttcaagcatatccggtccgctggtgccggccagcagcctggcactgccgccctgctcgccgcgccataataccggaatcgcatcacggtcgataagatgaaccatcggctcactggcaacgttgacaaactccgccaccgacacccccatcgccgcagcgattttgcacaacagcgcgatactgggattcgccctacacccttcgatatccaccagcatccctttactgacgccggcgcgacgggaaagctcgtcgagagagatcttcttttcgcgtcgaaactgcttaatacgccgcgataccgcctcattaatgcggcttagatcgttaccgttatcggtcgttatattgactttatcattcatcggtcgatattatgctctaaatcagtcattacaggattatgcaatgtctcacccattaccgtcaattagcccacagttagccgggatcgctcctgggtttcgggcactgagtattaccgtcaacgctgcgccgctaagtgatgcttctatcggtgaagccgcgctggcgtcagcctgtcaggcagtattagccggagagcccgcatgggcggaggaccatctcgcggcatggtctacggtattcaaagcgtttggcgctaaaccgaaacgtacgccctgttccgcagaggcgttgcgtaaacgcgtacttcgcgatggcgccatgccggcaattgacccggtcgttgacctctacaatgccgtcagtctgcggtatgccattcccgtcggcggcgagaacatcgccgcctattgcggcgcgccgcgtctggtcatcgccgacggctctgagccctttgatacgatgaaggaaggcttagccgccgttgaatcaccggaaccgggagaagtcatttggcgtgacgatcgcggtgtgacctgccgccgctggaactggcgacagggagttcgtacccgcctgagcgctcgcgatcgacagatgtggtttattctggaaagcctgccagagatgccgctcgaagcgctgcatgaggccggccgcatgcttaccggggggctggagcagatgatgcccggcttgagccaccagtccacgctaatcagcctataaagtcagacacaggagcaggtaatgtcactatttttaaccagttttatctttgagaagaaagagtacgacgatgacttttatcaactggacggcgagatcgagcgctatacccagtcgctggagggatttatcggtatggagagctatcatgatgccgccagcggccgaatcatcaacaactactactggcgcgaccgacagtctatggaaatgatgatgaaccatctgcaacaccagcaggccaaagctcaggggcaacgctggatcgccgggtatcaaaccatcgttgccgagattgagggcagccacaatatgaacctgccccatccacttgcggagtatccactacgctaccaatcaaaacatcagtgattttgaacaagataggcaaattgtttcgattttaaacaatcatcattggttctattcttatcacatcggagcaacagcgctcctcgccaaacaaaatctttaaggaatatgaccatgaaatccatcaaaacttttgctgcagttaccgtgctgtccctgatgtcattcggtgctttcgcccagagcgtgacggcaaccgcttcaaccctcgaccgtgcggaagcgaaaattgccgcccaggctgcggagcaaggcgcgtcttataaaattaccagcgcccagttcaataaccgcgtctatatgactgccgaactgagcaaataatagtgcgagtgtgacgcgccaggctttatctctggcgcgccgcgctgcttttcagcgaagacagtgtcgttgtcctctccaccgatgcttcaactacctgccacttgctccagcaccgccgaggcctttgccgctatttcggcgctgacttttgtcgctagcacgtcaataaatccacgcagttgctgcgccgtcaggccgttgtgcaggctaatcgcgtaatggctcttcagctggctttccacgcccgataatgcggccagcattgaaatcgtcgccagctcgcgcgtcggccaatccaggacgtcacgctggaaaatatcgccaaacagatgcgccttcagatagcagtcgatagctggcgcaaattcaaatagcggtccgctgaccgtttgcccgaccagttgtgtctgattacggctaccggcctgcaggctatcccaattctccggtaacggggtcgctgtcgccccctcgttatcaataacgcctcgcgcctgacgctcggttatcaccttcatcaggcaggagagcgcattcaggctacgcggaaagccgcagtaggcgtacagctgcaccagcgtctcttttaactcatttatcgtcaggccggtgtccagcgcggtatccagcgcatgggccagcgccgcgatattgccttcggcggccagggcggcaaccgggatcagcgcctgttggcgcgcgttcaatgggttttgcatcgtttgttctccaaacggaaagtatcgacaggagaaaaagattatagaaacttggcagggggttgattagccaggcaaaaacgaacagacctatgagatgggctcatgaattatctattacgatgcacagggcttccttgccctggggaatattattcgaagtagacttccggattttccgacagtgaaacgaaggttttggtgtctttatccagcgcgcgaatatcgccgctttcgatatcatagaaccagccgtgcagacgcagggttttgtcacgcaggccaaccgcgaccgatggatgcgttttaatgttgttcaactgggcaatgacgttttcctgcaccataccgttcactttatcggtctcgctggcccaggttttcttctcaaccaccgctttcgccgcgtccgaataacgcaaccagtgggaaacggcaggcattggttccagacactggcaggtggcgatggctttcatcgcgccgcagttggagtggccgcagatgacaatatccgtcacaccgagggcgacaaccgcatattcaatggtggctgacacgccgcccggctccggcccgaaagagggcacaatattaccggcattacgaataacgaacagctgccctggctcctgctgggtaaccagctccgggaccaggcggctatcagaacaagagatgaacaacgcttttggattctggctcgacgccaggctgcggaagagctctttgcgttgcgggaaaatctctttctggaagttgaggaagccctcaatgatatgttgcatagcagtgtctcttttctctgtagtaattacgatatgacaaagatcacatttagctagtgtatcaccgaagcgcagaatgggaatcgttattgataatagctgtgcaataagcacccaacctgtcctttgggtgcttgcctctgtgggtctacataaagaacttcaccgcttgttgcaaggtggtgcccattccccacagcaagggtataccgacggccagccagcttagcgtcagcagcagcggcgcgggcgtcggttcccagctcagctgcgcatctttattgatagtatacagacccctcgcctgctgctgttgctccgcggtcatggcatatttctgcggaatcggccgaaccagctgattacaaataaagccgatgataagcaacccggtcaacgccagcagcgtgatgtcataaattctcgcgggttccaccccctgcgccagctggtactcgcgcaaatagttgaccagcaccgggccgctgatcccggccgccgaccaggcagtcagcagacggccatgaatcgcgccaaccatttgtgagccaaatacgtcggcaagatacgccgggatggtcgcgaaaccgccgccgtacatagaaataatcacacagagcgcacaaacaaaaaacgccacgtagccgccgtggttaatcaacggcaacgtgccgtaaagtagggttcccagaaagaagatcagcgcgaaggtggctttcctgccgcacatatcggaaacagaagcccagaaaaagcgccccagaatattaaacaggctgagcagcccggtaaatcccgccgccatcgtcgcgatgcgcttcagctgttctgtattaagttcctgccagcccagatccagggatagtagcttaccggcaaaaatctcctgcagcatcggcgaggccatgccgagaatgccaatcccggcggtaacgttgagccacagcaccagccacagcagccagaattgcggcgtgcgccacgcgacgctgacgtgaacctgaacggttggctgtttgctgatggcttgctgcgccttcgcgccgaccggatgccagcccataggcggcagacggtaaccaaaagtaccgcagagcataaacagcgcatatataaccgccagcgccagaatgctctgccataccccacttccctgaccatcggcgaaaaaattaatcagccaattagccagcggcgctcccaccagcgccccgccgccgaagcccatgatcgccattcccgcggccatccctcgcttatcggggaaccagcgcaacagcgttgagaccggcgagatatagccaagccccaggccaatgccgccaatcacaccggcgcccaaccacagtagccacagctgatgaaaatagattgccgcgctcgccagcaccaggccgccacaccagcagagggtggcgacaaaactcaccagacgcgggccaaccttctccagccagctcccccaaagcgccgcggagcagccgagaaaaacgaagaacagcgtataggtccagccgagcagggaaattttccagtcgcactggcgggtcaccagttgctgccagaatgacatatcgaccggacactgcagcggcgcgctgccgccgataagctgcgacattggcagccagtagacggaaaagccgtaggccatgccaatgcacaaatgcaccgccagcgccgcgggagggaccaaccagcggttaaatccaggtttagcaataatgcggggcttagcaaaaaaacgactcaacgatgaaacgggcggagtcgcgagattctcatttatctgcaccatattcctgtccttatcatgtttgtttgccgactatcgcagtagccgacggcaaacggtaaaggcaagaacaatgccatctgctgaaaaaacgaacagaaaatggcgactgaagcgagcaagcacaacccataagccatgaggagagggagttgaaagctgtaaaaaaagagaaaatcatcggtagtgattttctcttttccggacatcggggtattttcgttgccagatcaataacgatcggcgattttgataaacgttgctctcagagtgatacggcttatcagaccccgaccagttcatactttttaattttgcgatatagcgtcgcaatgccgatcccgagctcatcggcggcctgctttttattgctatagcgcgtcagcgcatcgcggatcatctgtttttccatctcctccagcgccgtacccccctcttcttctttcgcaacgctggctggcgccgcccggctgctttcgcgctcgttgactttgccgctgctgataagatttggcggcagcagcgacagatcaatcacctcgccggagggaaccacgttaaccagatactccatcaagttactcagctcgcgaatattgcccggccagcggtagttcttcagtaaggcgatgacttctggggacacgccgggatagaccagctccagccgacgggtgtgcagatgcaggaaatagtgaatcagcagttcgatatcatcctgacgctcgcgcaaaggcggcaggcgcagtgggatgacattaagccgatagaacagatcttcgcggaatttcccttcggcaatgaactgctcaaggttctggttagtggccgaaatgatgcggatatcgaccggcaccggatggctggcgcccaccggctgaatttcgcgcgattcaatcgcccgcagcagcttggcctgtagggttaatggcatatcgccgatttcatcaagaaacagcgtgccgtgattagccgcctgaatcagaccggtcttgccgttggccgaggccccggtaaatgcgcctttgacgtaaccaaagagttcgctctccagtagctgttcgggaatggccgcgcagttgatcgcgatgaaaggcttcgcctgacggtcgctaagcttatgcaccgcgcgagcgaccacctctttgccggttccactttcgccgacaatcatcacgctcgacgggcttggcgccacgcgggtaatcagttttttcagctgacgcattggccgacattcgccaaccatctgttcaatctgcgggccatcctgcggcggcgccagatcggccgacgaatgcgactgatggaaggccattaagaacagccattgatcctgaatagcgtgcagctgaccgataataagctctttcttatcatcaaaagaaatgacgtgctgtacgtgaccgcgaataaagttttgcgcaaaagtcagcggacgaaaatgaatagttttgccaatcatactgccatgattcgcgccaaggattttcatcgccgcctgattggcaaatttcactttttgatcctggctaaccaccagcacgccctgatccatgttttcaatcatggtggaaaacattttaagcatattatctcccccgccctggtcctctaacaggcgggagacaaatattgaagaaacgtggcgtacataatctgaaaactcgtggaggttgtcattaatgcgctcctgctgctcgcgagttaaggcgaccaggctaataaccccgacacactgttcctgataaatcaccggggtacccagaaatgccttctctttacagttctctttattggtacagtctttacacaagggatcaaaacgcgaatgagtcacgaccttttctttttttgtttctattatgtaacgtaaaagtcgcgaatctgtatttaattttcgccccagaaatttaccgtaggcgccggtaccggcgacccggcacagcgtattgtcgacaatctcgacttcgagttgtaacacgctggagagcatgcgggcaaaacgttgaatcgttggctgaatctgcattaaaacggatagcgaattggagggaatcataattgaccttttaatatcagtagccgaaagaaaatgctgaagatcgactctttttattctgcgtttatcatactaccgccgcccaggttgaaaaaaggtgccaaccctgcgcttttttacagcttaaagaaaatatggaagaggtatcacattttcctctcaatatgataatccgcagggcaaaattatcattttggtgttgaaatcaccgtcgcagaacgatatccacgcttgtctgacggctcaaagtaaatttaccgtgacaactggcaaatgaatttcatttccatcagttgagcgttacaagccatttttcgtgacccgcctcgcataatccccgacttttccactcacccaccgcgactgaattataactggcacgcttattgttagtggtaatacagcgctggccgtcgccacttacatcaatgtcatttcgactgcacagcaatcaataagccgtcattcactaccaggatcgaaatatgaaaactgttaacgaactgatcaaggatatcaataagctcaactctaacctgcatgaaaaagatttcctgctgacgtgggagcaatcgccggacgagctgaagcaggtgctggatgtcgccgcagcgctgaaaacgttacgggcggaaaacatcgcgaccaaagtttttaacagcggactgggtatttcggtctttcgcgataactccacccgcacccgcttctcttatgcctcggcgttaaacctgctcggcctggcgcagcaggacctcgacgaaggtaagtcgcagatagcccacggtgaaacggtgcgcgaaaccgccaatatgatctccttctgcgcagacgctatcggtattcgcgacgatatgtatctcggcgccggcaacgcctatatgcgtgaagtcggcgaagcgctggatgacggccacaaacagggcgtactgccgcagcgcccggcattaataaacctgcagtgcgacatcgaccatccgacgcaggcgatggccgatctggcctggctgcgtgaacacttcggctcgctggaaaatctgaaaggtaaaaaaattgccatgacctgggcctactcgccaagctacggcaaaccgctttccgtcccgcagggaatcatcggcctgatgacccgcttcggtatggatgtcaccctcgcccatccagagggctacgatctgatcccggacgttatcgaagtggcgaagaaaaacgccgcggcttccggcggcagcttccgtcaggtcaccgatatggcggaagcctttaaagatgccgatattgtctacccgaaatcctgggcgccatacaaagtgatggaacaacgcaccgagctactgcgcgccaacgaccatgacgggctgaaagcgctggaaaaagcctgtctcgcccagaacgccaatcacaaagactggcactgtaccgaagagatgatgaagcacaccaaagacggtgacgcgctgtatatgcactgcctgccggcggatattaccggcgtctcctgcgaggaaggcgaagtcaccgaagcggtgttcgaaaaataccgtatcgccacctataaagaggccagctggaagccgtacatcatcgccgccatgatcctctgtcgcaaatatgccaaacccggtcagttgctggagcaactgctgcaggacgcgcaaaaacgcatcaaataacctcgcgagccggtctgcgggccggcttccccgactccaaagaaggataaggacaaaatatgtctgctttttcgctgaaaatggatattgccgacaaccgtttctttaccggtgaaacctcgccgctgttctctcgtcagcaggcacaacaggcgcgccattttcatcaaaaaatcgccggttaccaaccgacgccgctgtatgccctgaaggaactggcgacgctgttcggcgtaaagaacatcctggtaaaagatgaatcccagcgctttggcctcaacgccttcaaaatgctcggcggcgcctacgccatcgcccaactgttgtgtgaaaaataccatctcgatattaacgccttctcgtttgagaccctgaaatccaccatcaaagagaagatgactttcgccactaccaccgacggcaaccacgggcgcggcgtcgcctgggccgcccagcagcttgggcaaaacgcggtggtgtacatgccgaaaggttcagcgcaggaacgcgtggacgccattttacgcctcggcgcggaatgtatcgttaccgatatgaactacgacgataccgtgcgctttaccatgcaaaccgcacagaaaaacggctgggaagtggtacaggacaccgcatgggaaggctacacaaaaattccaacctggattatgcaaggttacgccaccctcgccgatgaagcggtagaacaaatggcggcgatgggcattgctcgccctacccacgtcttcctgcaggccggtgtcggcgcgatggcaggcggcgtgctcggttatctggtcgacgttttcggcgcccgcgatttgcactcggtgatcgtggagcctgaactggcggactgcatctatcgctccgggttaaaaggcgacatcgtcaacgtcggcggcgacatggccaccatcatggcaggactggcctgcggcgaacctaacccgctgggctgggaaattctgcgcaactgcaccacccaatttatctcctgccaggatgccgttgccgccctcggtatgcgcgtactcggtaatcctgtcggcaatgaccaccgggttatctccggagaatccggcgccgtcgggctcgggacgctggccgccgtccacttccatccgcagcgccaggcgctgatgaacaaactggggcttgataaccactccgtggtgctggtcatcagcaccgaaggtgacaccgacgtgcagcattaccgtgaggtcgtctgggaaggcaagctgccggcagcacaataaacgttcaacttattcaacatattcatcccgcgaagcgggaaaccaggatcggagagttaattcatggctaagcacattcctttcaaactgattgtcgaaaaagcaaaccactaccagcaggatatgacccgcttcctgcgcgatatgatcgctatccccagcgaaagctgtgacgaaaaacgcgtcgtgcatcgtattaaagaagaaatggaaaaagtcggcttcgataaagtcgagatcgacccgatgggtaacgtgctgggctatatcggccacggtccgcgactggtcgccatggacgcgcatattgataccgttggcatcggtaacatcaagaactggactttcgacccctatcaggggatggaaaccgatgagctgatcggcgggcgcggcgcgtccgaccaggaaggcgggatggcgtcgatggtctacgctgggaaaatcatcaaggacctcggtctggaagatgaatataccctgctggtgaccggtaccgttcaggaggaagattgtgacggtctgtgctggcagtacatcatcgaacagtccggcattcgcccggaattcgtggtcagtaccgagccgacggattgccaaatctatcgcggccagcgcggtcgtatggagattcgcgtcgatgttcagggggtaagctgccacggctcggcgccggagcgcggcgataatgccatcttcaaaatggggccgattcttaacgaactgcaggagctctcccataacctgggcaatgatgagttcctgggtaaaggcaccctcaccgtttcagaaattttcttcacctcgccaagccgctgcgcggttgccgacagctgcgcggtctctatcgaccgccgtctgacctggggcgaaacctgggaaggcgcgctggatgagatccgcgccctgcctgccgtacagaaggccggcgccgtggtctcaatgtacaactatgaacgcccgtcatggaccgggctggtttatccaacggaatgctacttcccgacctggaaagttgaagaggatcatttcaccgtacgcgcgctcagcagcgcttatgaaggactgttcggtaaagcgccggtggtcgataaatggaccttctccaccaacggcgtttccatcatgggccgtcacggcatcccggttatcggtttcgggccaggtaaagagccggaagcccatgcgccaaatgaaaaaacctggaaacagcatctggtgacctgtgccgcgatgtacgccgcaatcccgctgagctggctggccacagagtaagtttgtacggttattcctcccgccgcgcgtcggcgggagtctggagtttttatgcgcgtactgattaaaaacggcatcgtggtcaacgccgacggccaggcaaaacaggatctgctgattgaaaacggcctggtcagccagctcgccgaacggataaccccgaccgaaccttgtcagactatcgatgccgcagattgctatgtcatgcccggcggcattgatgttcatactcattttaatatcgataccgggcacgctcgcagctgcgatgatttcttcaccggcacccgcgccgccgcctgcggcggtaccaccactatcgtcgaccatatgggcttcggccccgccggctgccgccttcgtcaccagctagaggcctatcacggctatgccgcctacaaagcggtgatcgactacagttttcacggcgttatccagcatatcaaccatgccatcctcgatgaaatcccgatgatggttgaagccgggattagcagcttcaagctctacctgacctaccagtataagttgaacgatgatgaagtgcttcaggcgatgcgccatctccatcgcgctggcgcgctaaccaccgttcatccggaaaacgacgccgctatcgcccgtaaacgggccgaatttctggcggccggcaaaaccgcgccgcgctaccacgcccttagtcgcccgctggagtgtgaagcggagtctatcgcgcgaatgatcaatctcgcccagctcgccgacaacgcgccgctgtatatcgttcatctctccaacggtctggggctggattatctgcgtctcgcgcagcggcggcaccagccagtgtggattgaaacctgtccgcaatatctgttgcttgacgaccgctgctatgaacgcgaagacgctctgggatatctgttaagcccgccgctgcgcaacgccagcaacaatgatgcgctgtggtgtggtatcgccgatggttcgatcgacgtggtggcgaccgatcactgcgctttctcgatggcccaacgccagcagctctccggcggcgatttcagccgctgtccgaacggcctaccgggggtggaaaaccgcctgttgctcatgttttcccacggcgtaatgaccgggcggatttcagcgcagcgtttcgtcgcgctcaccagcgccactcccgcgaagctatttggcctgtggccgaaaaaaggacgattggcgcccggcgcagatggcgatgtcgtcattatcgatccgcagcgcaccaccacgatccgccatgagatgttgcatgacaacgccgactattcaccctgggagggctttatttgccagggcgcgattcgccagaccttatcgcatggccgggtcatttttgataacggcaccttcaccggcagcgctggtcagggacgttttttacgccgtgatcccttttctaccgctcaccttccggtcagcggaatcacatcttaagtgaggtattcatgagtaagaaaattgtactcgccctcggcggtaacgcgctcggcgaggatctggccggacaaatgcaggccgtcaaacaaaccgcgcaggctattgtcgatctgatagcccagggccaccaggtggtcgtaacccacggcaacggccctcaggttgggatgattaacctggccttcgaagccgctgccaaaaccgaggcccataccccgatgttgcccatgtcggtctgcgtggccctaagccagggttatatcggctatgatctgcaaaatgccctgcgcgaggagttgctgtcgcgatcgatgcatatcccggtggcaacaatcatcacccaggtggaagtcgacgccaacgatccggcgttcaaaaatccgaccaaacctatcggctcttttttcactgagcaggaagcagaacagctgacgcgtcaggggtacgccatgaaagaagatgccggacgcggctatcgccgggttgtcgcctcgccgcagccggtcgatattattgagaaagagacggtcaaagctctcatggacgcctgccacgtagtgatcaccgcgggcggcggcgggatcccggtaatccgcgaaggcaatcatctgcgcggcgccagcgcggtaattgataaagactgggccagcgctaaactggcggcgatgatcgacgccgacatgctgatcatcctgaccgcggtcgagaaagtggcgatcaactttggcaaacccaacgaacagtggctggataagctgtcgctcagcgatgccgaacagttcattcgtgaaggtcacttcgctaaggggtcaatgctgccgaaggttgaggccgccgcctcattcgcccgttcacgtccggggcgcaaagcgctgatcaccgtattaaataaagccaaagaagggattgaaggaaaaaccggtacggtcattgaagggtaaaaaggcaccgaatgtagccccggtaagcggtagcgccaccggggattttgaggccatcaacaccggcttcgtgctgctatctacgccaccgacaataactcactcttctcttttattcttttattcatcagcgtcatcagcgcctcaagcaccccaccgccaatggcgcgcgccttatcggagacgctggtaaaatcggcgctggcgccgcgcgggtcgatatcgccaattttaaagccgctctcgaccactaacccatcgctgagcaaaccgcgcaccataccgcttaatggcgcaataatctcggcctcgccgacggtggcgatgatatcgccttcgttcacaatatcacccagcgccaccttcgcgcgcatcaccccggctcccggcgcgcggatcacccgtcgtgaagtatggccaagaatattaccaggaaccccggtgttctcctgcgctttgccatcgtaaatcacctgccccagccaatggccgcgattggtttcaatcaccgcatggcaatccacaccggcgcaaaaaccagggcctagcgcaattaccgctggcgccatctctcgctgcgtaccaaaattctctttcgccagtatggcatccacgacgcagacagggcgcagttcattcagcgattcgcatagcggatccaccaataccgggatcgcgccattttcaattacccggatggcctcctgagcggatgacacccgcttcgccaccaccccttctaccgtcatttcaccgtcgaagactgcctgggcaaacgcgacgctgcggcggataaccgtcggtttagcgacttccaacatcaccactttgaaccccgcatgccacagacgcagagccacgccgctggcgatatcgccggcgccgcggatagcgaccaactgctgctgcgcaggcgtggctgccgccatcagcaagccacctggcgcgcgattttttacctgcaggatttccgccagaatgctaatcgctatctcatgcggcgtttcggcgccaatgttatagccaaccggcgcatgcaggcgggcaatatgttctgcggcaacgccgttttcccgcatctggcgtaaaaacacctggactttacggcggctggccagcagcccaagccaggcgaccggccgttcaatcagtttatccagcgcttcacgatcctggttattggtggcgattaacacaaagtcatcgccgcggatcgccagattctccaccgcctcgctgaaggtttcagcatgcagcaactgcgttgtcggcggaaaatagtcggggttcaggctctctggatagatatcggccaccgccacctcaaaacccagcagcgccgcgctttgcgccaccgcgcggttcacgtgcccggcgccgatcagcaccagacgcgggcgcaggccatgtacgctaatatataccgacatcgccccgccgcaatcggagccgaccgcatcgctgccgctacgcgccatccgcccatgaaacatgcgcgacgccttttcgctgagcgcttccagcgcctgttcaatcactttgcgctcaaccatgccgccgccgatggtgccgactatcgaaccatcttcacgaattaacatctgcgccgaatggcgcggtgttgagccgcggctatcgacaatctgcgccagcgcaaacgggcgattctgtgcttcgagttttgccgcttcagagaaaatattcataacaacctcaatggatatccgctatgcgcccaagccggggcgtcactctgttgttcgtcgtcgcgttatcgcgggctgctcttgtactgctcccgcccacagtgcgttaactccccactgctgcaacagcgcctgctccggtaaattctcattttgagaaagctgattcagcagcaggatccggcgactggcgggcggaacgcctttaaacgctccctgcggatgcgtaattaagcgatgcagcattggccaactcagcgccgtatccggcgccgcaccggtgatccgggaaaaaaggggccagcgatgaatggtcgctggcccaacgttttgcccgagcctccaggcccccatgacggcaataacgcagcaacaggattgaggtatgcaaggttcgtgctcagctggcgcttttaaggcgaaaccgtgagccccgtcagcttctaccagcaccacatccacgcgccccgcggcaaccagcgcatcaagctgttgcgggctaaacccacgaaccttacccgcaggggcgagccacgaggcgtagcaggcctgcagcggccgctgccaaacctcgacaggcagcgccagcggttcgcggcaaatcaccacaggtagtgatgccgggagatacatatgggtggtcgtggtgatcagaacccgccggccagcctccagaaaacgctgcgccagccacattaaggtactggttttgcctcccgcgccgacggcggaaatgagcagcggaccatcatttacgcctaaatcacaaaacagcgattgcagatgcggtatattttccatgcgctggtcaggattccattattcagggaggagtatgaaacaggtcgattgtattattaccgccgccggattgtcctcccggatgggacagtggaaaatgatgttaccctggcgcggaacgacaatacttgatgcaagtataaaaaacgccctgcaattctgctcgcgtattattctggtgagcggttttcgcgcagaggagctacatcaacgctattcggcgcatccgcaaataaccctggtttataatcccaactatcaacagggtctgtttacttctgtttgcgctggcgcgagccaggtgcgaaacaacttctgttttatcaccctcggcgatttaccctgcctgccgccagcgcttttccagcggctttggcaacaacgcggcgacagcgcccttcttccgcaatatcaaggcgtaccgggtcatcccatccttattaccggcacacagctgcgccaacttatcacttacgatggacctgactcaatgcgcaaacggttattacagagccgccatcgctgcctggagttagattttccgcaaatggtctgggatatcgatacccctgctgattttattcgcctgcaaaaccagtattaatcatgtctttgtcgggaaattatcattgtgatatttcgccgtttattttgagaaatcccgacggataaaaatatagagtgattttaattctcattaccatagcgtgagcccattcacatagcccggcgttctttagacctctctcacatttttaattatttcttcctcctgtctttaataactggttcgattgttgctcctccttaactatccgtcggaataagcaccactaaccggcaaatttgattgcacaaataaaggagagggttatgggggatatcatgcgtcccgtcccgtttgaggaattattgacgcgcattttcgatgagtatcaacaacaccattccatttttggtattcctgagcagcagttctattcgcctgccaaccaacgccgggtaagcgtcttcggcgaaagctgcgccaccccaatcggccccgccgccgggccacatacccaactggcgcagaatatcatcaccgcctggctcaccggtgggcgatttatcgagttgaaaaccgtacagatcctcgaccggcttgagctggacaaaccctgtatcgatgccgaagacgaatgctttaacaccgaatggtctacagaatttacgctgcaaaaagcgtgggatgagtatcttaaagcatggtttattctgcatctgttggaagaggttttcccgttcacaccggcgaagaacggtaagtcctttattttcaatatgagcgtcggttataacctggaaggcattaaacaaccgccgatgcagcagtttatcgataatatgatgaacgccgccgggcagccaaaatttacccagtaccgcgacacgctgaaccgctggctgcatgatgacgccttcctcacccgcttgtcgctggatgatattcgcccacggctggcgacgctcgcggaacgcattcctgcaaaactggtacaaggggttaccctctctaccatgcatggttgcccgccagatgaaatcgaagcgatctgccgctatatgctggaagagaaacagctcaacaccttcgtgaagctcaatccgacgctgttgggctacccgcgcgtacgcgaaattctcgacacctgcggctttgactatatcggtctgaatgaagaatcttttgaacacgatcttaaaatcggccaggcgctggaaatgttgacgcgcctgatggcgttggcgaaaagtaaacaacttggcttcggcgtgaagctgaccaacaccctcggcacggtcaacaataaaggcgcgctgcccggcgatgagatgtatatgtccggccgcgcgctgttcccgctctccatcaacgttgcggcgctgctctcgcgtgaattcgacggcaaactcccgatctcctactccggcggcgccagccagctcaatattcgcgatatctttgaaaccgggatccgccccattaccatggcgaccgatctgctaaaacccggtggttatctgcgtcttagccagtgcatgcgcgagctggagcaggccgatggctgggagatgaatcaggtcgacgtcaagcgcctgaacgcgctggcggaaaaagcggtcagcatggagtacacgcaaaaacactggaagcctgacgatcgcatcgacgttggcgagccgctgccgttaaccgactgctacgtcgccccttgcgtcagcgcctgcgccatcaaacaggatattccggaatacattcgcctgatgggcgagcagcgctatgccgatgcgctggagcttatctatcaacgtaacgcgctgccggcgattaccggtcacatctgcgatcaccagtgccagtacaactgtacgcgtcttgattatgacagtgcgttaaatatccgcgagctgaaaaaaatcgcccttgagaaaggctggccggaataccaacgccgctggcataaaccggcgggttccggcagccgaaacccggtggcggtgattggcgcaggcccggcggggctggcggcgggctacttcctcgcccgcgccggccacccggtcacgctctttgagcgcgaagccaacgctggcggagtggtaaaaaatatcattccgcatttccgcattcccgctgaacttatccagcaggatattgagttcgttgttaatcacggcgtcaacattgtctacggctgcgaaccgcatctcaccgtcgaaaaactctgtcaggagggttatcgctatgtactgatcggcaccggcaccgacaaaaacagcggcgtgaagcttggcggcgataacccgcatattcataagtcgctcaacttcctgcgcgcgttcaaccgcggcgatcgcctgaacgtgggtaaacatgtggccattgtcggcgcgggtaacaccgcaatggactgcgcccgcgcggcgctgcgcatccccggcgttgagaaagcgacggtgatttatcgccgctcgcagcaggagatgccggcatggcgcgaggagtacgaagaagccctccaggatggcgttacgttccgttttctcagcaacccggaatacttcgccgctgacggcacgctaaccgtccgcaccatggccctcggcgagcctgatgaacagggtcgacgtcgcccaatacccaccgatgaaacctggacgctgcaggtcgatacgctgattaccgctatcggcgaacagcaggatggcgaagcgctggcggcgatggggatcccgctcaacgatcgcggctggcctgaagtcaacgctgatggcgaaagccggctggctaatgtattcctgattggcgacgtacagcgtggcccttcttctatcgtctcggcgataggcaacgcccgtcgcgccagcgatgcaattctcaaacgcgagaatatccgcagccacttcggcgataaacagtggaataacgtcgatcccgcggacatctaccgccgcaaagggaccattgctatcgctcaggttgataaagacgaccgcgatgcctttgtcgcgcaggaggcggagcgctgcctcgaatgtaattacgtctgcagcaaatgcgttgatgtctgcccgaaccgcgccaacgtctccattgcggtaccggggttcgacaaccgctttcagacgctgcacctcgacgcgtactgcaacgaatgcggcaactgcgcgcagttctgcccatggcagggaaaaccctataaggacaaggtcaccgtttttagcctcgaacaggatttcaacaacagcagtaatccgggttttctcgtggagcaacagcgcgtccacgtgcgtcaggatggcatgacctggctgctggatatcgaccagcgaggtcagttcgctgaagtaccgccgcagctggatgccatgtgccgcatcatcagccacgttcatcaacatcatcactatttgctgggagtcgtcgaagtatgagtatcttagtgcttaaaaatgccacccttgcccagcttcatccggcaaaagtggaagaaggtgtcgatatcgtcatcgaaaatgacagaattatcgaaacaggcgcgaacctgagcccgcgttacccgcaggcgcgtattaaagaaatgcacggccgactggtgatgccgggaatggtctgctcgcataaccatttttattccggactgtcgcgcggaattcaggccaatatcgcgccgagtcccgattttatctccacgctgaaaaacctgtggtggcgcctggaccgcgctctggatgaggagtccttatactacagcgggcttatctgttcgctggaggccattcgcagcggctgcaccgccgtcattgaccacagcgcgtcgccgaactatatcgctggatcattaagtcagttacgtaacgctttcatcaaggtcggcctgcgtggcatgacctgctttgaaaccaccgaccgtaacggcgggttgcaggaacttcaggcaagcgtcgaggaaaatatccgctttgcccgcgaaatcgatcgggcgcgggaaagcggcgacgaaccgtatctggtagaagcgcatatcggcgctcatgcgccgtttacggttcctgatgaggggcttttaatgcttcgcgaagcattaaaaacaaccgggcgcggcctgcatattcatatggcggaagaccgttacgacgtttctcacagccaccatcactacggtaaagatctgctggtacgcctggcggagttcgatctcatcgatagtaaaacgctggtagcgcacgggctgtatctgtcggaagctgatattgaactgctgaacgcgcacgatggttttcttgtccataacgcccgctctaacatgaacaaccacgttggttataaccagcagttgacggcgtttcgcaacctggcgctgggcaccgacggcatcggctccgatatgtttgaagaactcaagttcgctttctttaaacaccgtgatgccggcgggccactgtggccggatagctttgcgcgggcattaagcaacggtaacacgctgcttagccgcaactttaacgaccgttttggccgtattgaggcaggctataaggcggatttaaccatcagcgattatattccgccgacgccgctgctggcggcgaatctcgccgggcacatcgccttcggtctgggggccagccacgttcatagcgtgatggtaaatggcgtcatggtctatgaggatcggcagttcgctattgattgcgatacgattttcgccgaagcgcggaaggtggcgaagaagatgtggcagcggatggatgcgttgccgtaaacccatcacgcaaaaacaaaacccggtcgctgtaccgggtttattttttggcttctaccggggctataaatagcacagaaacatcgatcgggtagcccggataagacgcagcgcgtcgccatccgggactctcctacaagctcaacaagctggcgctggcgatcgttctctgtttctgcagcgccgccagggcctcaccggtcatcagcgatattgccgccgttgggcacaccgatacgcaggccgggccaccatctcgctgctcgcagagatcgcacttcacaataaccggcggatgcgccgccgatgtttcgatagtaatcgcgccaaatggacaggcgacgacgcagctctggcagccaatgcagcgcccggcatcggcttctacccgctcggcgcccatcgccaatgcgccggtcggacagaccccgacgcatggcgcgttttcacactgatggcacatcaccggcacgctcaacgtgtcgagtcgcatcaccttcaatcgcggatgaaactccgccccttccgccacatgctccagtgcgcaggcgacttcgcaggtacgacagccgatacaggcctgtgaactggcaagaataaaatgggtcatcaccgctccttatggtcaaatcgcgccagcatttcgcttgcggcctggcgcccggcaaccatagccgtcaccaccagatcggcgccatgtaccgcatcgccgccggcatagattttgtcatggctggtctgtgtggtgccgcgacctttgccgcccgttacaatctgcccccagcggtcaagtttgatgccatgcccccgcagccacggcatgtcgtgagcctggaaaccaaacgccagcaccagcacatcggccgggagttcgaattctgaaccggcaattggccgcgggcgccggcggccatccggccctggttcacccatttcggtacggatcatcccgacggcgctgacctggcctttacggttacgcaggatatattgcggctgaacgttaaactgaaacgccacgccctcctcccgcgcgttcaccacctcttttttcgagcctggcatgcttaactcatcgcgacgataggcgcaggttacgctctcggctccgcgacgcaccgcggtgcgcaaacagtccatcgccgtatcgccgccgcccagcaccaccacccgcttacccttaatgtcggttaacggatattcggcgctctcttcaagacccatcacctcacgggtattggcaatcaggaacggcagcgcctgaataacacccggcgcgtcttcgccatcaagacccgcgcccatcagcccataggtgccgacgcctaaaaagaccgcatcgtagttagccagcagttcgctaaagtccacgtcgcgccccacttcctgattgagatggaaacgaatccccatatcgctgaagatctcgcgccgcagcgccattaccgttttttccagcttgaaagacggaatgccgaaagtcagcagcccgccaatttcaggatgtttatcaaaaacatcaacctgtaccccggcgcgcgcgagaatatccgcgcagcccagtcccgccgggccggcgccgataatagccacgcgttcctgacgcggggcaacctcgcctgtagttggccgccagcccatcgccagcgcggtatcggtgatatagcgttccagattgccaaccgccaccgcgccgccttcgtttttcagcgtacaggcaccctcgcatagcctgtcctgtgggcagacccggccgcagatttccggcagcgaactactttgatggcagagttctgcggcctcaataatcttgccctcacgcaccagtcggatgaaatcaggaatatggttgtgtaacgggcaggtccagttgcaccaggctttttgcgcacagtacaggcaacgctcgctttcatattcggcatcacattcgctaaggcgctggtagatctcggcaaaatgcccttttcggtcctccgcggcaagcttcttcgcccccacccgcggcgctttatccagtatcgcttcgcgccttgcgccacgacgctcggccagcggctgcccttgggcggagcggatttgtctttcccgctgcaaccgcttcagggcgctctcgtccattacgcgcagcgcctgagtcgggcaactggccacgcaggcctgctctgcggagggacgatcgcgacaaagatcgcatttttgcgccagctgcgggccatcttccccgctggcgaccatctcgattgcgccaaatgggcaagcgacaacgcagtttttgcaaccgatacactcggcctgggtaaactggatgctgtcgttggcgacatacagcgcctgggtcgggcaggaggtgacgcaaggcgcgtcgttgcaatggtggcaagtggtcgcagtactggtattccggtggaagacaacatggatgcgcggaacaaacgcgctgcgctgtgccggccaggcatcctgatgatgcgccgtgacgcaggctacttcgcaggcatgacatccaatacagttcgcaacatcggccacaataaatcgattcatttgcttcccttttattcttctggaatagtcttagggatggattgcaatattcgggcgatatttggcgctcaacttatgtagccattcatttttgcgagtcagctcaaattattactctcctgtggctctcgaataaataaaacctcatcaaatcaccgggatggcatctcaattccgccctgactttttatcatttttatcttcttagcgcttattttgcctaccaaaatgagacgctatatatctcaaactgatattcgccatttttatttctgatgcccgctcgcaacgttaaaccggccagcaagaaatagacaagccaacccgtgattgatttcacaaatatattactccactgccgcatcgctcatttttggcacagcttacgcataaccctcctaacgcataagcaactccgtgcgcgttatacgctggtgaacatcatcagcagagggaggcaatggccttcgaatcgtaacttcccccctttcagttcggcacgggcggaagtcgtaaaggagacaactacttcatgaaagattttgccattccggcctcacgcaatacggcgactgtcgcgccggtcgatgaggtcctgccaattacgcaaatgattctctatggattgcagcacgtgctggtgatgtacgccggggcggtggcggtaccgctggtggtgggtaacgcggtcggtttgcctgcggagcatattattttgttaatcagcgccgatttgtttatttgcggcgccgcgaccatcgtgcaatcgatgggcatcaagcagtggttgggctgccgcctaccgctgatccagggctgtactttcgccgcgctgatcccgatggtgcttattggtaaagagtacggtatcggggcgatctccggctcggttatcgtctccggcatttttatcctctgctgcgcgccgtggattagccgcctgattcgcttctttccaaaggtggtgatgggcggcattgtaacgctgatcggcctctctattatgccggtcgcgggaggatggattggcggcggcagcagcgagatggccggtttcggcgatctcttctcgctgctgatggcggccatcacgctggtcattattcttaacctgtataccttcgctaccggcgtggtcaaaaacacctcggtgctgattgggctggtgatcggcactattttatggagcttcttcaagccgctggattttaacctcgtcaacgctacgccgtggctacatctgccacaggtgatgcagttcgcccggcctgagtttcatatcgtgcccgtcgccctgctgtcgatggtaatggtggtggtgatggtcgaaaccatgtcgtccatcatggcgaccggcgatatcgtcggtaaacaggtcacggccagcatgctgcgtaacggcctgaatacctgcggactggcgacgacgatctgcggcttcttcaacctgtttccctacgcggcctttgcgcaaaacgtcggcctgattggcctgaccggcgtacgcagccgtttcgtggtgtcggtctcgggcgtcattctgatgctgatgggcattttcgccaaaatggcggcgctggtggtactgattccgaaaccgatcctcggcggcgccggtatcgttatgttcggcatggttgccgtttccggtattcgtacactcggtcaggtcaactatcgcaacaataacaacgggatggtggtcgcactcacccttggtctcggcatgatgccggtattggtgccgaatctgtttacccagttcccgccgatgatgcagctgtttctgcacagcggcatcactatcggcaccctgacggcgattgtcgccaacctgacgctgaacggcagcgtgccgttccgtatttctcacgatgtcccggaaccggacccggcgccgccgagcgcggctgcccgcaacatggccgtgcgtacggtacgcatgtggctgctgctgcgcaaggtacagaaaggtcaaaccgccgctgacggccaggagtgattgatgtctatgtcgcaacgtctgctttttgcactgttgatgatggccctgatggcggttcccgccatccaggacgccattaccctcggaattaacagccgttttatctatctgttgccgtactatttttaaggagtcacacgatggaaaaagtcaccaccgtctgtccctactgcgccgctggctgtaagctgcggctggtggtggacgacggcatggtcgtcggcgccgaagcggccatggggaaaaacaatcagggcaccctgtgtctgaaaggctattatggctgggacttcattaacgatacccagatcctgaccccgcgtctcaaaacccccatgatccgtcgccaacgtggcggcaaactggaagccgtctcctgggatgaggcgctcgattacgtcgccacccgccttggcgccattaaagaaaaatatggcccggacgcgatccagaccaccggctcctcccgcgggaccggtaatgaaaccaactacgtgatgcaaaaattcgcgcgcgccgttattggcaccaataacgtcgactgctgcgctcgcgtctgacacggcccttcggttgcaggtctgcaccagtcggtcggtaacggcgccatgagtaatgccatcacggagattgataacaccgacctggtgtttatcttcggttacaacccggcggattcccaccctatcgtggcgaatcacgtcattaacgccaaacgcaacggggcgaaaatcatcgtctgcgacccgcgcaaaattgagaccgcgcgcatcgccgacatgcacattgcactgaagaacggctcgaatatcgcgctgctcaacgccattggccacgtcattattgcagaggatctgtacgataaatccttcgtcgccagccgttccgaaggcttcgaggagtatcgcaaaatcgtcgaaggctatacgccggagtcggtggaagagataaccggcgtcagcgctcaggagatccgcgcctgcgcccggatgtacgccagcgccaaatccgccgccatcctgtggggcatgggcgtcacccagttctaccagggcgtggagaccgtacggtcgctgaccagccttgcgatccttaccggcaacctcggcaagccgagcgtcggcgtcaacccggtgcgcgggcagaacaacgtccagggcgcctgcgacatgggcgcactgccggatacctatccgggctaccagtacgttaagttcccggaaaaccgcgagaagtttgccagagcctggggcgtcgacagcctgccggaacataccggttatcgcatcagcgagctgccgcaccgcgccgaacacggcgaagtccgcgcggcgtacattatgggcgaggatccgctgcagaccgatgccgagctttccgcggtgcgcaaggcgtttgaacagctggaactggttatcgtccaggatattttcatgaccaaaaccgccgccgcggccgacgtcatcctgccgtccacctcgtggggcgagcacgaaggcgtgtataccgcagcggaccgcggcttccagcgcttctttaaagcggtggagccgaagtgggacctgaaaaccgactggcagattatcagcgaaatcgccacccggatgggctatccgatgcactacaacaacacccaggagatctgggatgagttgcggcatctgtgcccggacttctacggcgccacctatgaaaaaatgggcgagctcggctatgtcatgtggccatgccgcgatgagtccgacgccgaccaggggacgtcgtatctgtttaaagagaagttctctacgccgagcggtaaagcccagttcttcacctgcgactgggtcgcgccgggagataaactctctgcacagtatccgttggtgctgtcgacggtgcgcgaagtcggccattactcgtgccgttcgatgaccggcaactgcgcggccttaaccaggcttgccgatgaaccaggctatgcgcaaatcaacaccgccgacgccgaacggttaggtatcgaggatgacgcgctggtgtgggtcaattcgcgtaagggccgcatcatcacccgcgcgcaggtcagcgatcggccgaataaaggcgcggtgtacatgacctaccagtggtggatcggcgcctgtaacgagctggtgtcagagaacctgagcccgataaccaaaacgccggagtacaagtactgcgcggttaacgttgaacggattgccgatcagcgcgcggcggagcagtacgtgatcgaggagtacaacaagctgaaagcccgcctgcgcgaaagcgcgatgggttaaggttcggcggccttacccgatatccggcccctccccggtggcgcttacgcttaccggggctaccaaccgaataccgaaccgtagcccggataaggcgcgatgcgtcgttatccgggaatcctcccccggtggcgcttacgcttaccggggctaccaaccaaataccgaaccgtagcccggataaggcgctatgcgccgctatccgggaaccctccccggtggcgcttacgcttaccggggctaccaaccgactaccgaaccgtagcccggataaggcgctgtgcgccgctatccgggaaccctccccggtggcgcttacgcttaccggggctaccaaccaaataccgaaccgtagcccggataaggcgctatgcgccgctatccgggaaccctccccggtggcgcttacgcttaccggggctaccaaccgactaccgaaccgtagcccggataaggcgctgtgcgccgctatccgggaaccctccccggtggcgcttacgcttaccggggctaccgaccgactaccgaatcgtagcccggataaggcgcgatgcgccgctatccgggaaccctcccccggtggcgccttatctggccagcaaatcgcgcaaaacagcagccccgttacaagatcacgatttaatcgcgtgttgaatggagtcaataatcggctgatagccggtacagcggcacatattgccttctaatacatcctttatttgcgcttcgtccggatgcggctctttggttaataattcggtggcgctgaccagtactcccggtgtacagaacccgcactgcacgccgcccttctcaataaatgcatcctgtaatttttgcgtaatcggattatcgtttaacccttcgagcgtctcgatctccgcttcatcacactgttcggccagtaccagacaagaacaaacggcgttaccgtccatcagcaccgtgcaggcgccgcattcgccaatcgaacatccctctttggtggcggtaagatgcaatgtatcccgcaccagatccaataggcgcatattgccttctacttttgcttccaccagcttgccgtttaccttcactttaattgtgctcatagctctatcctgtacagggcgctctggcgccctgattgaatcattaaatccctgaggcccgttgcgcctcggccatcatgtcgcggaacatattgacgaacaccggctgcttatatgccgccgaccagcgcttaccgatggccgcatagataagcttgtccagcacctcgcaggcgctgttaatcgtgtcgctatttaacggtttccctagcaggcagcgttcaatatccagtaaccgctgcggcttactgaacagcgcgccgtccaccagacggcagtagctcaccgtgccatcatcagcaaaatcgagcagcgcgctcaggctctgacgggtgatgttgagcgcgttgcgtcgccctaactggtgatagaaacctttagcccgcgggcgcaccggcggcggcagtatcactttggtcagcagttcatccggctggcgctgggtgttgtagccggacagcaagaactcggccagaccgagggtgcgtacgccatttagcgagcgcagctcgatgcgcgcgtcatagaggatggcaggcggaatggaatcgccgcagggcgcggcgttgacgatattgccgccgatggtggcgcggttgcggatctggtgcgaaccgacggtatgacaggcctgcaccagcagcgggtaacgttcgcgcaacagcggatgatcggtaatacggttaaaggtcatcgctccgccaatgatgacctcatggctgaccggatcttcgctcacctgcgtcaactccggcagacgggaaatatcaaccaaccgcagcgcgcgggtttgcagacgcccctgcacaattacatcggtaccgccggcgatagccgtcacgccctcttgcgccagcagggttaacgcctcctgcaggcttttcgctcgggtcacttccacatcagtgaggcgcagcacctgcttcttgttttccgcctccagcatcatttcgctttggcgaaccggctttttcaagttgtagccgaggatcacctgttcaagagtcaacggtaatttattaaaccgcgtctcgagagcaaaactcaccgcgttgttaatagccgccgccgccagttcagtggctggttcgccgatccccttcgcccccagaggcccggcgatatccgggttttctacgccgataatcgtcatcggcggaatatctttcatcgtcggcagcaggtagctgtcgaagttttccgatttgacctggccattttcaatgttgaagtcttccagcagcgcgtagccaaaaccctgcgccaccccaccgtaaacctgaccttcaaaccccaccgggttgagtacccggcccacgtcatgggcggcggtaacatgcagcaaatcggttttaccggtgctggtattcacccgtacctccgccacctggcagccgtaaacccaggtaaagtacgggctgccgcagcctttttcttcatcccaatgaatgggcggcggcacaaaccagccgtactcggtcaggctgacgctggcccatttggttttattaaccgcagttttgaaatcaatacgccgttcactgtcctggacgttgatgataaagccatcctgccacaaggtttcagccaactcgcgggtgccgatgctgtcgccgacgacgctgagaatgcggcgttttatcttgtccgcggcgtcaagaatcgccccaccgccgaccatagtcccacgggttgccgccgtcgatccgccgtcgccgataaccgaggtcggcggttccataaaatgcagttccgatagaggaataccaaaggcttccgcggcgattagcgacatcgcggtttgcagaccctgaccgttttcagaaaccgatgtcgccagattgacgctgccgtcctcattcacctgaatgagcgccgtcgaggtatctaccccttccgcgccgatggaacaaccacggtagctcagcgccaggccaatgccatagcgataaacgccgcctttttggttcaattcacgatagtgctggcgttttgccgcaaattccgaggcattcaccgccttactcaggacttcagtcgccgagacggtgtgtttatcaaaccgctgcccggtgaccgaggtatcgccctgacgcagcgcgttcacttcacgcaccgccaccggcgagagattgagcacttcggcaatttcatccataaaggattcgttggcgtaaaccacctgtggtgaaccgaaaccacgcatcgccgaggtatagctgttgttggtatagacggctttgacgtcgatatggacgttatcaatattgtacggccccgccgcctgcaccgaagaacgccaggtgacgaacggggaagacgccgcatagccgccgctgtcggcaagaatatcgattttgatcgccagaatgcgtccgttgtcgtccaccccggcgcgatacttcattttataagggtggcgcttacagctttcgataatggactgctcgcgggtgtaggtaaatttcaccggacgaccggtcaggcgcgtcatcaatgcggaacggcaggccaggtgatcgatgatgtcatctttgccgccgaacgagccgcccatcaccgcgcgtttgacgttaatctggctctgcgggcagcccataaacttagccacgaagctgcgtacgcggtgcgggttctgaatggagccggagataatcaggctaccatcggtggggtcaagccaggtcagtacaacttccggttcaatgtaagcgtgttcctggaagcccacttcatattcacgttcaatcacgtgactggcttcggcaaaacctatggcgatgtcgcccttaacggtgtggtgatgggcggcgatattatcgctgcgctccgggtgaattcgccgggcatccggcgccagcgcggcttctacgtccgttagcggctcatagggcgtatagcgcacatgtattttatccgccgcctcacaggcggcttcataactggttgccgccaccacggcgacgacatcgccgtggaagaccacctcgtctttgacgataggcagataatctttgacgataatccccacgaccggagtaccgggaatatcttgccaggtggcgatttttaccacgcctgcaacattcagcgcctcgctaagatctatcgcctcgattttcccggcgggtatatccgcaaagcggcaaacgccatacagcatgcccggtaaggtaatatcgtcgccataaacggccgttcctttgactttcgccagtccatccacgcgccgtagcggcgctgaaggtgaagcacacataacagtcccctcaatgattatccgttgcgggcaatcccgggtttgctaaacgtcgcgctatccataacccatgggaaaagccacatcaccgataacaaatccaagatttgtgccagaaatcaatgaggtgccgtttaagattcgtttttgtgagtcgtcgcgcaaaatgcggctaaagtacggagaaaatagcgctactaaggccgcgtcccgcaggccagtaacatttcgccgccatttttatcaaagtgatagcccggttttctcaaattaataatttgcccgtgtgctaaacggtatagatacggatctcgtgttcacggaaagcatcccggtatttacggctgatgttttcctccacgaccagcacgtcaatggcactgctttcagctaccacaaaacgcgcgacggcggggattttatctgaggttaagccaacgataatttcactgcactgtttgataaccgctttcttaaattcacaatcggcgtgatcaaagccggttagacctgactccggagccattgcgcagccgccaataaatccctgatcgaagaggatcccctgcacctgggccaccgccgatgcgccgacacaaccgcctgccgcgcgttgcaccagacctccgagcatcacaacctcgtaaagcggttttttaagcagaaccgccacaatttccggggaattggtaaccacggttaaggccagttcgcccggtagcgcttccgccattgccagattagtggtgccggtatcaataaaaatacagccgcccggtttcactagctgtgcgcatttctgtgcgattctgctctttgttgccctgtttttctctttacgttcgttgtactccatggattccggcagggtcatgaccgcgccaccgtagactttcttacaatatccgtctttgctcaactcatgaagatcgcggcgaatagtgtgttcagagacctgtaagcgctgggccagatcggcgcagacgaccctaccgtcctcctgcaggatctgacaaatcagcgcttgtcgttgctgagggaaagcagcataatcgagcacaataactcctttaaataaatacaacgagcagtaaagagcatgatcattcactcatgcgcatgctgtcaacccgactctttacgaggtaaaccatgaaagttgcccatatcgctctctggacccgccatcttgagcagcaagcacgcttttgggtggagttttttgccggtgaaatcaacgaaaaataccgtagtaaaaccaatcctggttttgaatcctactttgtaaaaattggctctgacgtggccattgagttaatgaccaaacccggtttacatgactcgacccacgataacaaccatacggggtgggtgcatctggcgatcgccgtcggcggcacggaacaggtgaatgcgttagccaaacgcgctgaaatggcgggaattttagtctctgccccgcgcaccaccggcgatggctattatgaggcggttatcaaagacccggatggtaacctggtggaaatcgtcgcatagtaagggaaacccacatgaaggagtcgaccgtggcacattatcgcgtcattgataaagcgagctggcctcgcctggatcactttacgttctaccgtacctttgccaatcccagcttcaatctgtgcgtaccggtcgaagcgcaacagttgtacacctgcgcgaaggaccggggcgtttccttctttcaactggcgttattcggcctgttgcgtgcggccaacgccgtaccgcagttgaaacagcgcctgcgcaacgacgatatcatcgaatatgacgccatctcggtgatgacgccgatcatgacggccagcgaaggttttcgccaggtatggtgcgataacgccgctgatttccccgcgtttagcgccgccgcaacgccgcgcattgaggccgcaagaagcaccaatccctcaccgcttattgtggaagaagaaaatttcttttgcgccagttgcctgccgtggctgcacttcagcgccatgacccatgcggaatactacgtgggcgcggcggtgcccgccctgacgtgggggaaactgaaaaatggcatcattccggttgccggccgatttaatcacgcttttgtggatggcctgcacgccagccgtttttatgccgaagttgaatattatttcgctaacccgcaggccctgtggctgccggttgaggcccgcgattagctgccgcggcataaagaacaatccactatgacttccccgaaaaccggcattatattgccggttttttgctaatgcgaaatggctataaaccatagcgtttcgttgttagacagtattcagcgcgcctcttatcttcgtcatgaattgtaaataacaacgcaatcatttgatgaggtagcacttttgtccagattacggcaaggattaaaaaccagacaaacgcgcttcgcgctggcgctgaaagtggcgctgctcggtagcatggtggcattttcttctgtcgccaacgccgacgatattcttaaagaagggattactcccgcaaccgatgccagccagatcccggccagcgccaaactgcgtaaagacacggtggtggccggcatttccgaaccacaggggatctttaacccttacttcttcgtcaacggttgggatgaaaacgtcaccaacgttattttttcacgcctgattgactgggatagtcagggtaagctggtgccggggctggctgagagctggacggtgagcgcggataacaaagtctataccatcaaattacgcccaaacctgaccttcagcgacggatcgccactcaccgcggaggatgtcgcctttacgctgaccgttcttctcgacccgaaatatgacggcgataccgatattactctggccaatatcgccggcggcgcggaatataaagccggcaaagccgatagcgtgagcggcctgaaagttatcgatccgctgaccttacaggttactaccacccagccgggcgcgacaacgctggcgaaaatcggcggtccggtattatcgaaagcctggtacggcaaagggtatcaacgcggaaatctggattatctgcgctctctgcacggaaaaccgctgggtaacggtccttatgtctacgataaatatattcccggtcaggagattcgcttccacgccaacacgcatttttatcgcggtacgccgccaacgccgcgctttatctatcgcgtgaccaatccgtctaccaatttccagctattccagaccggcgaaaccgactacgacgccttcacctcgcgtccggatgatattgagcagcttaagatgctcggttttgccaatatcaacctgtacggctccagcgactacagccaggtggagttcaacgtccatcgcccggcgctgcaggataaaaaagtgcgtcaggcgctgatttacgggcttgaccgccagaagttaatcgacgtggtgtatcagggatacggcaaggtagccattgaaccgatcgcgcctatttcctgggccttcaatgcgcagggcgtcaacccctaccattacgatccggtgcaagcgaaaaaactgctcgatgaagcgggctggctgcctggcgccgatggcatccgcgtgaaagacggtaagcgactggaattgaccctgctggcgagcaaaaaagtcattaacgatgcgctgatcccgattgccaaagagaactggcggcagataggcgtgctgctgaaaccgcaggtggttgatttcaacgcgctgatggcgcagcgcaaagcgggtaattacgatttggcgtcgttcagcaccagcactctcaacgatccgcatgacggcgtgtgggacttctacagcagcgaggccaaagagtcgggctaccacaacgctgaagtcgataagcttatcaatgcgggcaacgcggtgctggatgtcgaacaacgcaagcctatctatcaccagctgtatcaggtgctggccgaggatccgccggttatcctgctgggataccgggagattctttccgccagcagcgcccgggtgaccggctttaagccggatatctataacggcctcaccggcagtttgccggatgtgaaaatcgtgaagtaaatcccccagccgccggccccccggcggctgatgtgagaatgttatgaaaaatttcatcctgaggcgcctattgcaaacgctgccgatgctgctgctggcctcctttatcatttttatgctctttgccaaaacccccggcgactttatcgatggcaacattaccctgacggccgcccgcgccgccgaactgaaggcgatatacggcctcgaccagccgctcttcacccgctaccttcactggctggggcaactgctgcgcggggatttaggcttctcgctgcaataccaaattccggtcagccagttactgaaccagtacatctggaactccttcctgctggcaagcgtggcgctggtcttctactggggtatcggcctgacggttggcgtagtctccgcgctcagacctaattcctggtttgatcatctggtgagtatcgcggtgttcgccgccatgtcctttcccacctttttcctctgcctgctgctaattaagtggtttgccgtcgacctgcactggctgccggtaggcgggatgaccaataccggtagcgacgatagcggctggcggtatgtgctgcaggtcgccgctcatctggtactgccggtactggcgctggtgatgctgcaggccggcagcctgacgcgctattttcgcgccagcatgcttgacgtggtgaagatggatttcattcgtaccgcccgagctaaagggctgcgagaacgcacggttatcatgaaacacgcgctgcgcaatgcgctactgccggtcatcaccctgcttggcttcgaactgccgggattgttctctggcgccatcattaccgaaaaagtatttaactggccgggcgccgggcacattcatatcgattcgctggccgctcgcgattatccggtattgatggggtttaccctgtttctggcggtgctgacgatcatcggtaacttactggccgatgtgctctacgcgtgggccgatccgcgcattcgagtgaggtaatgatgataacttccctgtttggttaccgtcgccgcctgcgccaggcgacaatccccgcgcttgcgcaaataaccccctctccatggcgtcaggcatggcgccaactgcgccgcaaccggatggcaatgctgtgtttaatcctgcttgcggtgatggccctgtggtgcgcgctcgggccgatgtggtcgccgtggaaagatgacgccaccgatgcgctgatgatcaacaaaccacccggcgccgaacactggttaggtaccgattttcttggccgcgatatctatacgcgtttactgctggccgggcgcatttcactgataatcggcctgttgactatgctgctatcggtaacgctgggctacctgctgggagcgctgtcgggctatgtcggcgggctcaccgataaactgatcatgcggctagccgatctggtgatgacgatacccggcctgccattattaatcgtcgccggcgcgatgctctccgagctcgacttttcgccggattcccgcatctggatggtcgtaattatgctcagcctgctggagtggccgaagctggcgcggctggtgcgcgggcagtgcctgtcgctacgcgagcgcgattttatgctggcgacgcaggttctgggactgtcggcgcgtcgccggctgttcggtcacctgctgcccaataccatcccgattctggtggtgatggcgacaatggcggtcgctaacgccattctgagcgaatcggcgctgagctatctcggcctcggcgtggtaccgccgacaccatcgtggggcaacatgatggatgctgctaacagcctgattgattttcagcggcgaccgtggctatggatgcctcccgggattgccatctttattactgtgattgctattaatgtgctgggcgacggcctgcgcgacgcaatggacccgaaaatgaaacagaggctgaaatgagcacgccattaatttcttttaagcaactttctgtctctttcgctgctgaaggtagccgggtgcgcgcggtacaggaggtctctttttcgattcaggccgggcaaacggtaggtatcgtcggtgagtccggctgcggcaaaagcgtgaccgccatgtcgttaatgggcctgctgcctccccaggccgctcgcattgacggcggcgagatccatttcgaaggacgcgatctgctcaagctgaaagcccgtcacatggccgacctgcgcggcaaccagttggcgatgatcttccaggagccgatgtcggcgctcaacccggtactgaccataggcgaacagctctgcgagccgctcatccgccaccgcggcgactcgccgaaagccgcctggcagcgtgcaatacacctgttgaacgaggtgggactggcgcgcagcgaaagcctgatggcgtactatccgcatcaactttccggcggtatgctgcaacgggtgatgatcgccatggcgctgagctgcgggccgcaattattgatagcggatgaaccaactaccgcgctggatgtcaccgtgcaggcgcagatcctgcgtctgatacgggaccgcgcgcgcgaaagccagatggcgatgctgctgatcacccacgatctgggggtaatcgcgcagatggccgaaagggtcgtcgtaatgtatgccgggcggattgtcgaacagggaaccaccgtcgaggtgctgcgccagccccagcacccctatacccgcggacttatcgcctcgcgtccggtgccgggcgcgcgccgccggcggctttactccattcccggtcaggtgccggatctcgcgcaactgcctgcgggctgcgcgtttgccgatcgctgcgaacaggcaacagcacgctgccgtcaggacaccccgccactttttgggtcctcgcatcaggcagcctgtttttatagtcaattcgcggagtcggtggcatgaaccagccctatttaattgaagttaatggcttgaaaaagtatttcccgctgcgcgacggcctgttcggccagcagaccggggaactgcgcgcggtcgatgacgtcagttttaatatccgtccgggaacgattttcggcctcgtcggagaatccggtagtggtaaaaccaccgttggccgcaccttgcttggcttgtatgaaaagaccgccggcagcattaaattccgcggtcaggagttatccgaactgtcagcggcggcaatgcaggccctacgaccgaaaattcaactggtgtttcaggatccctatagttcactgaatccacgcatccgcgtcggcgaggcgattggcgaggcgatgctgcagcataaactatgcacgcgcgctgaactctatgagaaagtcattgcggtgatgaagatatgcgggctggcgcctcagcattaccaccgttttccgcatgaattttccggcggtcagcggcagcgcatcggcatcgcccgcgcgcttatcctcaatccggactttatcgtcgccgatgaacccatttccgcactcgatgtgtcgattcaggcgcagattatcaatctgtttgccgacctgcgcgacgagcgtggcgtcacctttctattcatctcccatgaccttggagttgtagagcatttgtgcgacgacgtggcggtgatgtacctcggtcaactggtggaaaccgccagccgcgatgcgctgtttagccgccctcttcatccctatacccaggcgctgctggccgcggtacccaccctcgatcccgaaagcgaaccgcaggcggtcgtccagggggaaatcccggatccgtcgcgcccgcctgagggctgccggttttcgtcacgctgcccgcaggcaagtgaccactgccgccgtcaggcgccgacgcttcgtgaaatttcgcctggacacctggtcgcctgtcattgggcaggataacgatgatcatcaagaggcgaggcatattttctgcggagtataaaaataagaaaacatgacattgctaaggttatgcgcacgtcatatcttcaaagcgtgtacttcactttaaggaacacccttatgattaagcgtcgcactctcaaatctgcacttgcggcggttatttcgctcgccgtccttgccgcgccagtttatgccaaccctggtaatggcaacgggggtggcggaggtcatggcaatagcggcggaggtggcaaccacggtaatagcggtggaaaccacggcaatagcggtaaccatggcaacagcagtgaccacagcaacaaaggccagggaaatgataagtcgaaagaggatcacggtaaccgtaaaaactacggcaaacccgaccatgtcgactctgatattagcttctcgcgagcccgttctctggcggtgaattatggtctggtaggttatcaggcgctaccgccgggtattgcaaaaaatgtggttcgcggcaaaccattacctccgggtattgccaaaaaaacgttgccggcatctatgattaacgatctgccttactacccgggttatgaatggcgtgcagtgggcgatgatttagtgctggttgcgttaagtaccgcaatcgtcacttccgtcattaacggcgtttttgattaattttttcacctttcaggttacacgccgaacgtcaaaaaggcccatcaccaggatgggccttttttttgctttatgcgacagggaataatgaggatccagacgggctggcggaaagcgctaagaatattgccgtgcaatggattttaatgatttgagagtagggaaaaccacgggttcgccgatgtctctggcctacgtcaatgccgcagggcagcgtattgcgcagagtgatattcagagagtaaaagtccagcattgccccctgctacctccccgcctgtcagccaggaacaggtcccgtttaccgggacctgtttcgtttagagaggttattcctccagcgcgtaggcgatgatatcgtccccgacgtccggcgagtggctggcgccgccggcggaaatcagcacatactctttgccggttttcggcgatttgtagaccagcggcgccgctaccgcgccaaccggcaagcgagcgcgccacagctctttaccgctggcggaatccagcgcccgcaggtagttatcctgggtaccggcgaagaataccagcccagaggcggtagaggttgggccgcccagggtcggcattcccagcgggatatgcagatgggttttcatccccagcggaccggtatcttccaccgagcccatcggcacctgccacagtagctgacggctattcaggtcaatagcgctcatggtaccaaacggcggggtattacagggcacgcccagcgcggactgcaggatgtcgatacgcacgccgccgtaaggcccggcaacttgcgggcgaacggtacccataaatccagggacttcgtcggtggagactttgtatttcgccatctcttccttgcgcaccagcgacatccgcaacggcatacgcatatcgttgacgaacagcgtaccggtacgttcatcgatggtgatgccgccccagttcatgccgccgagcaggcttggccactcgatatacggtttctctgacggcggcgtatacatgccaaggtaggtcgactctttaaaatcgatacggcacatcagttggtcgaacgacgtcacgccccacattgatttttcgctcaacggctcgacgccaagctgcggcatgccggtagagaacggctgggtggcagacagatgttcgccctccgccccctgatgagcgacgggcagctcttcaacacgggtcaccggtttaccagtgcggcgatcgagcacgtaaatctgtccggttttggtggtctggatcagcaccgggacgtcctcgccctgctcgtttttcatgtggaacagtaccggctgcgatgggagatcataatcccagatatcgtggtgaacggtctggaaaacccattttgttttaccggtactggcatccaccgccaccaccgcggagccatatttctctttcgcttcattacgatcgccgccccagtagtccggcggaccgttgccggtcggcagatagaccagattcagctctttatcaaagccgggaatggtccacacgttcggcgtttcgagggtataaacgcggcctttttccgggtcggtgatattttccggcttgccgacatcccaggcccagacgactttaccatcgcgtacgtcaaaagcgcgtacgaccccggatggctcgccgtgtacgatatcgcgtacccagccgcccagcaccgcaatatgccccatgatcaccggcgttgaagtcggatggtagcgtttgctgttttcggtgtcgcccatgccctgcttcagatccacgctaccgtggtcgccgaaatcagcgcacagttcgccggttttggcattcagcgccagcaggcgcgcatccacggtcgataccatgatccgctgcggacactgttgcagcgccgggctcgctttttcttccgcgctgagcgtatcgtcgctctgcacatcatagtaacccacaccgcggcaggtcacatgttccgccgtctgcgcgtgcgggtcaaagcgccagcgcgccttgccggtatcggcatcaatggcggtcaccacgttgagcggcgtacaggaatagagcgtatcgccaatttgcaacggcgtattttcgtcaacgccaatggccgggccggtcaggcggcggcctgtgtggtaggtccaggcgactttcagcttatgaacattttccggggtaatatcggtatacggcgcgaaacgggtgccggaggcatcgcggccaaagaactcccagttatcgctttttgccgcctgcgtcgcactattgtcgctcgccgctttcacgacgccattgtggatgccgccgtgcggatagaacgccgaaaccagcgtcgccagcagcgcgataaaaataaccgtggcgctccagttcgccagacgcacgcgagccaccggcatcgccgccgccagccacagggccagcattagcatcagcgcaggaaccaccagacgagggatcaggccccagtagctgagctgcacttcatacagcgcccagaccagcgttaacaggaaggtaataacagcaagaggcagcgcgtattgactacgagtgaagtacccaacggcgatgataagataagcgagaccggctaacagataccaggcgctgccgccgagcgagagcagcttgcccccccagatagttaagaaaatcccaatgccaaaactcagtaacacaaaaagcaatcggtatatggtgaagaagatccttcgaccatgacctttttgttcgtccatatttcatcccattcgacagatgtcgatataaccaaagcatttattttaaagcgccgatcgataagcgatgccgtacagcgcagttaacctgttggttggacgccccaaaccagggcgaagaacgtaagaaagtatatggacatgtaaattttatgtaaaatttaaccgcataaaatgtttagaattttttaattcataaaatgaatttgatagctcttatcgttgaaaactacgaaatactcagtctgggcacggtattaacgtaatgtgcggcaatcggccgatgagatgcatcgccctacgctttgccctataattgatgacggttaaaactgaacttatgtgggtaactcatggaatttgatctcgacaacctggtctttagcggcctggaagaagcggaagagcgtaacgctgaacgcctggatgaagcggataaaaaagcgcaggcgattgttgccgatgatgattgcggcgatgcctgcaaaatctaatgattaaaccggctaaccaggccggttttttttcgcctgtaactgcctaagcgggcaaaaagccctttagcgtttccagcagcgcctgcgccgccttcgacaactgcatatgtccggcatgaataacgccaatgcacttttcaatcggcggatcgcttaacggtagacaaaccgctcccagcgactgcatctgcgactggcataatgcgggcaccgcgctgccgcccagaccgctggcgaccatccgcccgacggtgaccaactgatgactttccagcgccacgtccaactggctaccgctacgcgccaactcttcttccagcatcaaacgcaccgccgatggccgctgcagggttataaaatccagcgtcagcagttcacgccagctcaactgctttttactcgccaaaggcgacgttttcggcacgatcgccacgaagcgatccaccgccagcggcgtaaacagcagattgttgacgggcgatggctcaaacgcgatccccatctccacccggccttcgcgcaccatctcaatgacctgctcattaatcacgtcatgcaccgttacgttgactcccgcatagcggtcgcggaaggctttaagcacttccggcagcacgttagcggcaaacgacggcatcgcggcgacggagatctttccccgctgcagggtgaaactttgccgcatcgcctcttcggcgttatcccagtccgccagcagctggcgggccatcggcagaaaggtttctccctcctgggttaaggtcactttgcgggtgctgcgctgtagcaatgccccgccaagcgcctcttccaaccccttaatggtcaaactcagcgccggctgcgacaggttcaggcgctcgctggcgtgggcgaagttaagagtgtgagctaccgctagaaacgcgcgtaactgtttgacactcattctcatttttctacctgttaactaattgaaagaatttagttaacgataaattaataaaaaaaccaaatgagtgggtcacaaattcaaaattatcaaatcagtccgcgcccttaatgatagagccatcgcaaggcaggagaaaaatgatggcaggactggataagcgcgtcgccagctatgaagcggcgctggacggattaaccgatggcatgacgttactggccggcggcttcggcctgtgcggcatcccggaaaacttaatcgccgaggtcaaacgccgccgggtacagggcctgacggtagtttctaataactgcggcgttgatggctttggtctcggcatgctgctggaaacgcgccaggtacgcacagtcgtggcttcctacgtgggagaaaatgccctcttcgaacagctggtactgagcggcgaactcgccgtggagctgactccgcaagggacgcttgccgagaaaattcgcgccggcggtgccgggatccccggattctataccgcgaccggttacggcacgccggtagcggaaggcaaagaggtgcgtcagttcgacggtaaaaattacattctcgaagaagccattcgcggcgatttcgcccttgtgaagggctggaaagccgactggtacggcaacgtggtctaccgccataccgcgcaaaattttaacccgttgatggccaccgccggacgcatcacggtagtggaagtcgaagaaatcgtcgcgccgggcgaactccccccttccgccatccacacgcccggtatttatgtcgaccggctgatcgtcgggcaattcgaaaaacgtattgaacagcgcacgctgcgcgccggagggaactgaacatgttaactcgcgaacaaatggcgatgcgcgtcgcccaggaactgcgcgacggcgattatgtcaatctcggtatcggcattcccacgctggtcgctaactatattccagccggtattgaagtgatgctgcagtcggaaaacggcctgttggggatgggcgaatttcccgatgagtcaacgattgatgccgacatgattaacgccggcaagcagaccgttaccgcccaaaccggggcggcaatttttgactccgcccagtccttcgccatgatccgcggcggccacgtcgatctcacggtcctcggcgcttttgaagtcgatgtcgcgggtaatatcgcctcgtggatgatcccgggaaaaatggtgaaaggcatgggcggcgccatggatctggtggctggcgcgcaaaacatcatcgtggtgatgacgcacgcctcgaaaaacggcgaatccaaactactcccgcaatgtaccctgccgctcaccggtgcaggctgtattcgccgggtactcaccgatctcgcgctactggaaattagcgacggcgcctttgttctgcgcgaatacgcccccggcgtcagcattgacgaaattgcccgtaaaacggccggacggctggtcattgccgatgacgtccgcgaaatgcgcttcactaaggaggcaatatgaaagaagtcgctatcgtctgcgcgctacgtacgccaatcggcagttttcgcggcgccttgtcttccctttccgccgtcgagcttggcgccgccgtagtgcgtggtctgcttgaacgcaaacagctaccggccagagccgttgacgaactgatttttggccaggtattaaccgccggctgcggacagaatccggcgcggcaaaccgcgctgcgcgcagggctaccggttgaaactccggccgttaccgtcaatctggtttgcggttccgggctgaaagctgtgcaacaggcggtacaagccattcgcagcggcgaggcggagatagtgatagccggcggccaggagagcatgagcaatgctccgtatctggttcagggcgcgcgcgatggcctgcgcttcggccatgccagcatgcaggacagcatgattcaggacggattatgggatgcgtttaacgactatcacatgggcatcaccgccgagaatctcgccgacgcctttgatatctcccgcccccagcaggatgccttcgccgccctttcgcagcgcaaagccgccgccgcgatagccgccgggcgctttcaggctgagatagtgccgcttagcgtccctcagggtaaaaaagcgccgcgcatggtggacgcagacgaacagccgcgcccggaaaccagcgaacaacagctggcgcagttgcgccctgcctttcgcacggaggatggcagcgtcaccgcgggcaatgcctcttcgctcaacgatggcgcggcggcagtcttattaatgagcgtcgataaagcgcggcagcttggcttgccggtgctggcgcgaattgtcagctctgcggtggccggcgtcgatccgtccgtgatgggtatcggcccggtaagcgcttgccggaaggcgctgcagcgcgccggttggtcgctggacgaggtggatctcatcgaagccaacgaggcctttgccgtgcaggcgctggccgttggcaaattgctggagtgggacagccagaaagtcaacgtcaacggcggcgctatcgcgctcggccatccaattggcgcctcaggatgtcgcattctggttagtctgctgcacgagatgcagcgccgcgatgtcagcaaaggcctggcgacgctttgcgtcggcggcggtcagggtatcgcgatgaccatcgaacgttaacaggagccactatgtttacaccacaactggcggtactgggcgccggcctgatgggcgtcggcatcgcctgtcattttgcccgccacggccacaccgtacgcctctacgacaccgacccggcgcgcgttagcgagattccaggcgtcgccgccgccattttgcgcgagctcgaagagtgcgagcagtttgatgccgctcagcgtacggcggtgctctcgcgcctctccggcaccacggcattaggcgatcttgctgacgcgaccttgctgatcgaagcgattccggaacgtctggcgctcaagcacgccttataccgcgaactggaaaccttaatagccgacgaagccattatcgccagcaacaccagcggactaccgcccgatcggttggcgcagggtatgcggcatccggaacgcttgttaatcgcccacttctggcatccgccgcattttatcccgctggtggaagtggtgccgggcagcgcaaccctgccgcatctcgccaaccaggtcagcgattttttatcctcctgctcgctggaagcggtagtactcaaccgcgccgcgccgggattcgtcggcaaccgactacagttcgccctgctgcgcgaagcgctgcatatcgttaagagcggcatcgcttcgccggaggtggtcgacaaagtgatgcgcgcctcgctcggccgccgctacgcgatggtcgggccgctggaagccgccgatatgaccggtctggcgaccgtccaggatatctgccagcacctgctgccggaactggccacaggcagcgacatgatgtcgctggtcgccgacaaggttgcgcaaggcgctaccggcgcccgcagcgggcaaggtttttatcactgggatgagacccggcagaaacgaatacagtcgcgccgtgagcatcagctgcgctacgccctgaaaccgtaacttctcgttttgtaccccgacaataacaatgatagtgaggagtcgtaatgagtgtgttgattgccctggccgcgttggcattactgatgctggctgcgtatcgtggatacagcgttatcctgtttgcccctatcgccgcgcttggcgcggtcctgcttaccgacccgagcgcggtaggcccgacctttaccggcctgtttatggaaaaaatggtcggtttcgtgaagctctattttccggtatttctgctcggcgccgtctttggcaagctgattgaactatcgggcttctcgcgttccatcgtcgccgccgcgattcaaattctcgggcgtcgacatgcgatcccggtgatcgtgctggtctgcgccctgctaacctacggcggcgtttcgctgttcgtggtggcttttgcggtctatccctttgccgccgaactgtttcgccaaagcggaatcccgaagcgactgatcccggcaaccgtcgcgctgggcgcattctcatttaccatggatgccctgccgggcaccccgcagattcagaacattatccccaccagcttttttggcaccaacgcctgggcagccccctggcttggattgataggttcactgtttatcatcaccttcggtttactgtggctggaacgacagcggcggaaagcgctcgcgaatggcgagggatacggtaccgatctgcaaaacgagccgcagacgccggataacatcaatctgccgcatccgctgatcgccattgccccgctgctgctggttggcctgctgaacctgatgtttacccgctggatcccgcaatggtacggcgccagccacgagctaacgctgccagggcttgccaaacccatcgtcaccgaggtcggcaaaatcaccgctatctgggccgtcgaggccgcgctgctatccggtatcgtcgtggtgctggtgttcggttttcgtaatattcgcggccgtctggcggaaggcagccgtacggcggtcggcggcgcgatcctcgcggcgatgaataccgcctcggaatatggtttcggcgcggtgattgccgccctgccgggttttctggtgttgtcgaaagcactgaccgccattcccaatcccctgttaaacgaggcgattagcgtaaccgtactggcggggatcaccggctccgcctccggcgggatgagcatcgcgctggcggcaatgtccgataccttcgtggccgccgcccacgccgctaatattccgcttgaggtactccaccgcgtcgcttcaatggccagcggcggcatggataccctgccgcataacggcgccgtcatcacgctgctggcaatcaccggcttaagtcatcgccaggcttacggcggcattttcgccattacgcttatcaaaagtctcgcggttctgtttgtcattgccgtgttctatttaaccggtattgtctgatgcctgatttaaggagtaacgaaatgaatttaaacggtaaaacagcgctggtcaccggctccaccagcggtattggtttaggcattgccaaagtgctggcgcaggccggcgcgcagctggtgttgaatggttttggcgacagcacgagcgcgcgagccgaggttgccgcgctgggtaaaattcccggctatcacgatgccgacctgcgcgacgtcgggcaaattgaagcgatgatgcgttataccgaaagcgaatttggcggcgtcgatattgtgattaataacgccggtatccagcatgtggcgccagtggagcagttcgcggtggaaaaatggaacgatattctggcgataaatctgtccagcgtcttccacaccagccgactggcgctgccgggcatgcgcgagcgcaactgggggcggattattaatattgcctccgtgcatgggttagtcgcctcgaaagagaaatccgcctacgttgccgccaagcatggggtgattggctttagcaaaacgctggcgctggagaccgcgcgtaccggcattacctgcaacgcgatttgccccggctgggtactgacgccgctggttcagcagcagatcgataaacgtatcgctgagggggccgaccctgagcaggccagagcgcagctgcttgccgaaaaacaaccctccggcgaattcgtgacgcctcagcaactgggggaaatggcgctatttttatgcagcgacgccgccgcgcaggttcgcggcgcggcgtggaatatggatggcggctgggtggcgcagtaattatcttcccaacggggagcctgtctgttcctccccggttggttcgtgctattcacccttcatatcaaaccgcgattgagcaaaggccttgtagactttatcgttagtaaacggcgggaaggtcgcactttttgccgcctcacgcagcgcggcacaataggctttatttccctcagccgtattcatcttttccagagtgccatcctgggcgaattctaaatgcaggcggcacttttttccccgccacgcgtagcggtcagcaagttgcgactcgaaggcttctttgatccccctcgcctgctgaccatactcatcctcatcgctaaaacgcccggagtcacagctaccgagggcagaggttttatgacaatccgacgggtgtagcggcgcacaaccgcttagcgcaacgactgccgcgacaaatatccatgcttttttcatcatacatccctgttggtttcagcaataaaaaactgccattactgtaccgcaaaccggaacgatcgcagcctgctatttctcaggggcaataatcaaaacatctccaaaaatcgcttcaccgtgcgcgaacgctcgaagcgccgccaggcgatggcaatatcggtcttgaccggcgtcccctgtatcgattgatagctgacgttgggcagcgcgatacaggtcatcgactgcggcaccagcgcgaaaccaaatccggcgttaaccatactcagcgacgatgaaatctgcgacgactgcctggcgcggttcatatcgatcccggcgcgcaggcagctattgaacaccagctcatacaaacccggcgccacttcgcgcgggaagaggatcggcgcgacgtcccgcaactgttccagcgccagcgtcggttccgctgacaatggattatcgcgcgggagcgcaatgaccattggctcttcatcaatgatacgcaagttaaacgccttactgctttcacacggcaaacggacaaaggcgatatcgatctccgcctcgctcagcgccgccatcaaatttgccatgttgccctcccgttgatggaggatgacgcctgggtgatcgagctgaaaacggtgcagcaaggtgaagatttgtggatggaaagcatcagaactggtaatgcctaacgacaggctgccgttcattccgcgggcaatgcccttggccttttccagcgccgcatcgctcagcgcgaggatttggcaggcatcttcataaaaggactccccggcttcggtcagctccaccccgcgggttagccgacgcaacagcggagtgccaacctctcgctcaagccgctgaatttgctgacttaacggtggctgtgagatacccagttctttcgctgcccgggtgaagtgccgcgtgcgggcgacggcgacaaaatagcgtagataacgaagttccatatcgaaaacgtctcaaaccagcatggtttctatattggaactgtgagctgaatcgggtcaacctttatttaacctttcttatatttgttgaacgaggaagtggctcatgaatcatgcttcagattgcacctgtgaagagagtctgtgtgaaacgctacgcgcgttttccgctcagcatcccgatagcgtgctgtatcaaacttcgctgatgagcgccctgctcagcggcgtctacgaaggtaccaccaccattgcggacctgctgaagcacggtgatttcgggctcggcacttttaatgaactcgacggcgagctgatcgcgtttagcagccaggtttatcaactgcgtgccgacggcagcgcgcgtaaagcgcgcccggaacagaaaacgccgtttgcggtgatgacctggtttcagccgcagtaccgtaaaacctttgaccatccggtcagccgccagcagctgcatgaggttattgaccagcaaattccttccgacaatctgttctgcgcgctgcgaatcgatggtcatttccgccacgcccatacccgcaccgtgcctcgtcagacgccgccctaccgggcgatgaccgacgtgctcgacgatcagccggttttccgctttaaccagcgtgacggcgtactggtcggttttcgtaccccgcagcatatgcagggaattaacgtcgccggctatcacgaacacttcattaccgatgaccgccagggcggcggccacctgctggactaccagctcgaccgtggggtattgaccttcggcgaaattcataagctgatgatcgaccttcccgccgacagcgcgttcctgcaggccaatctgcatcccgacaatctcgatgccgctatccgttcagtagaaagttaggagattcacatggacaaacagtatccgcagcgccagtgggcgcacggcgccgatctggtcgtcagccaactggaagcgcaaggcgtacggcaggtcttcgggatccccggcgctaaaatcgataaggttttcgactcgttgctggactcctcaatccgcattattccggtgcgccacgaggccaacgccgcctttatggccgccgcggtcgggcgcattaccggcaaagcgggcgtcgcgctggtgacctccggacccggttgttccaacctgataaccgggatggccaccgccaatagcgaaggcgacccggtggtggcgctgggcggcgcggtcaaacgcgcggataaagccaaacaggtacaccagagtatggacacggtggcgatgttcagcccggtcaccaaatacgccgtagaagtgacctcgccggatgcgctggcggaagtggtttctaacgcttttcgcgccgccgagcagggtcgcccgggcagcgccttcgtcagcctgccgcaggatgtggtcgatggcccggcgaccggcaaagtgctgcccgccagcagcgcgccgcagatgggcgccgcgcctgacgaggcaatcaatcaggttgcgaagttgattgcccaggcgaagaatccggtgttcctgcttggattaatggccagccagacggaaaacagcgccgcgctgcatcgtttgctggaaaccagccatattccggtcaccagcacctatcaggccgccggggcggtcaatcaggataacttctcgcgcttcgccgggcgcgtcgggctgtttaacaatcaggccggtgaccgcttattgcaactggccgacctggttatctgcatcggctatagcccggtggaatacgaaccggcgatgtggaacagcggcaacgcgacgctggtacatatcgacgtactgcccgcctatgaagagcgtaactacacgccggatgtcgagctggtgggcgacatcgccggcacgctgaacaagctggcgcaaaatatcgatcatcggctggtgctctcgccgcaggctgctgaaatcctccacgaccgccagcatcagcgggaactgcttgaccgccgcggagcgcagttgaatcagtttgccctgcacccgctgcgtatcgttcgcgccatgcaggatatcgtcaacagcgacgtcacgctgacggtcgatatggggagcttccatatctggatcgcccgctatctctacagcttccgcgcccgtcaggtgatgatctccaacggtcagcagaccatgggcgtcgccctgccgtgggccatcggggcctggctggtcaatccgcagcgcaaagtggtctcggtctccggcgatggcggttttctgcaatccagcatggagctggaaacggcggtccgcctgaaagccaacatcctgcatcttatctgggtcgataacggctacaacatggtcgctatccaggaagagaaaaaatatcaacgcctgtccggcgtcgagttcggtcctatggattttaaagcctatgccgaatccttcggcgcgaaagggtttgcggtggaaagcgctgaggcgctggagccgacgctacgcgcggcgatggacgtcgacggcccggcggtggtcgccatccctgtggattaccgtgataacccgctgctgatgggccagctacacctgagtcaaattctttaagtcatcacaaaaggaaatggaaatgaaaaaagtcgcacttgtcaccggcgccggtcagggcattggtaaagctatcgcgttacgcctcgtgaaggacggttttgccgtggcgatcgccgattacaatgacgtcacagcgaaagccgtggcggatgaaatcaaccagcacggcggccgggcaatcgcggtcaaagtcgatgtttccgaccgtgagcaggtgtttgccgccgtcgaacaggcgcgaaaaacgctgggcggattcaacgtcatcgtcaataacgccggggtcgcgccatcaacgcctatcgaatccattacgccggagattgtcgacaaggtctacaacatcaacgttaaaggggtgatctgggggattcaggcggcagtcgaggcctttaaaaaagaggggcacggcggcaaaatcatcaacgcctgttcgcaggccggacacgtcggcaacccggaactggcggtctacagctcgagcaaattcgccgtacgcggtttaacgcaaaccgccgctcgcgacctggcgccgctgggtattaccgttaacggctactgcccggggattgtgaaaacgccgatgtgggccgagatcgatcgtcaggtatccgaagcggcgggtaaacctctgggctacgggacagccgaattcgccaaacgcatcaccctcggccgcctgtctgagccagaagatgtcgccgcctgcgtctcttatctcgccagcccggattccgattatatgaccggtcaatcgctgctgatcgatggcgggatggtattcaattaataaaaaataagctctgacatggtttgcccctgcctgttcgcaggggcttttttttgccctgacacggctgcattttgccggttagcggctacgccttatccggccacggccctgccggtaccaatggcctcaaaacccccggtggcgctgccgcttaccggggctacagcgctgtgcgatttggtagcccggagaaggcgcaacgcgccgcctccgggaaaacccctgtgcgacaaaaaagttgccaaccgatgacagtatctactaccgagcctgctgcgcctgcgccagctggcgggcaatcgcctcgcggcgggcatcgccctccggcaacaacatcagcaactgctgtagcgccgctaccgcctgcggatagtcttcattgcgtaccgcgctgagcgccagcatctccagcaccggcaggtttttcggctgccgctgatgcagatcgcgcagcaacagctcgcccatccgcatctgcgcgttatcgcccgcccgcaccagcgcgctggcataatcaaagcctaccgccgggtcatccggcgccagcttatgcgcccgcccgaacgcgccgatcgccgtctcgccatcgtttagcagcagaccgagccgcccaagcagttgccagccggcgagatcgtcagggctagcctgcagatggctgcgcagcccaagcctcagctgggccaactcatccatccgcagcggcgctgcggtaggatctttcgcctgcgccagcagcgcgggataatggcgctcgctctgtcgccacagcagcacctgacccacatcgctggttttcagatagagcccgccgctgacaaagaccaataatagcgcccccggtagcagcaaccagcggctaagcggccgaacgcgcgtctgttcctgcggcgagatatccgccagcagcgtacgttgcagctcgacgatcatcgcctcattactatcagtatgctcctgctccagttcgcgcagtcgggactggtacagcgagcggttaatgtcattgcgatccgctgctgttttctgttgccgcgaccggcggtaacgcggatcgagcatacagcacagcccacccagcgccatcagtacgccgccgtaccagatccagcgcacgaatggtttgtagtacagacgcaccgcccaactgccatcatccagttcttcacccagcgcggcgtaaagatcgcgggtaaacccgccgctgatggccgcttcggtcatcatcatccggctggcggtgtaaaagcgtttttcggcatacagcgtggcttccgggcgaccgttgcggctgacggcaatcaccccctcgccgccgttccagttcggcccgacgatattacgcacgcccttgaagacgaagtgataacgatgaatatcgaggctgtcgccagcccgcatgcggacatcgcgctcgatgctgtagttctggctgaaggtgatgccaatgacggttaccgccacgccgacatggccgagcaccattccccactggctacgcgttaaggtgcgcaggccgcgccagaagccgtggcgatgcgtggcccgttcatggacttcaatcagcgcgaagataagcacccacagcgccatcatcaggccgatgaacgccatcgcggtgatgcggtcctgaagaagccatggtaacgccagtgaaagtgacaacgtcacgataagtgatatcgccaatcgtttaagctgtttacctggctcatcgcggcgccaacgaatcagcggccccagccccagcagcagcgcaaacggcgccatcagcgcggtgaacatggtattgaagaacggttcgccgatcgatatcgtccccagccctaacgctttatgcaccaacggcagcagcgtgcctaatagcaccaccagcatcgcggccatcagcagaatattgttgccaagcaggaacgactcgcgcgaccagagcgtatgttccactcgcgcccgtactcgcccgcctttcaccgcatacagcagcagcgaaccgccaatcgcgagggtcagcaaggccagtataaacatcccgcgcgccggatcggaggcaaaggagtgcaccgataccagcacgccggatcgcacaagaaaagtccccagcaggcacagcgagaaagccgccagcgccagcagtaccgtccaggcgcggaagctgccgcgcttttcggtcaccgccagcgaatgcagcaaggcggtgccgaccagccacggcataaacgaggcgttttccaccgggtcccagaaccaccaaccgccccagcccagttcgtaataggcccacgccgagcccagcacgatcccaagtgtcaggaacatccacgccgcctgcgtccacgggcgcgaccatcgcgcccacgcggtatccagccgccccgccagcagcgacgcaatcgcgaaggcgaaggccaccgagaagccaacgtagcccatgtagaggatcggtggatgaaaaatcatcccgatatcctgcagcataggattgagatcgcggccatctacgggatacagcggcaggctgcggctgaacggattggaggtgaacaggataaaaagcaggaaaccgaaggcgatcattcccatcaccgccagcacccgcgctaccgcgtcgggcggcatctggcgactgaagagcgcgacggcgaacgtccacacgctgagcagcagcacccacagcagcaaagagccttcgtgcgctccccaggtggccgccaccctgtaccacaccggcagcgcgctgttggagttttccgccacatagcgcacggtgaaatcattgattacaaaagcatgcaccagcagcgcaaacgcgccgatgatgcagataaacagcgcgcaggccagcggccgggctaatgccatcagccatcgttcctggcgcgctgcgccccatagcggaaagatacttagcagcagcgccagccctgccgccagacacagcaggtagttgcccagttccggcatcatggctgtgtcccctgttgttcaggtgtcatcacgttttttacctcaggcggggcgaatccagtgccccgccccggcccatttactctgcagcagccggcagtttcgagacgtcggcgttacctaacgccttctcatcgcgaatcatcgacttatcttttcgtactttcgccacatcgctggcgctcaccggcggcgcgttgttgccccaactggtgcggatgaagttgaccacatccgcgacctgttgatcgtcaagacgccagccgaatgacggcatggtcaggttcgagaccgcatccttcaccgccggcgtggtgttgccggtcagaatgatgtgaatcagcgaggtcgcatcttcggtctgcaccaccgggttgcctttcaacgacgggaacgcgcgtttataaccgacaccatcggtacggtggcaggcggcacagttatcgacgtacagcgctgcgccggttttgctgtcatcgcctttccacagatctttcgccacgctatcttccaccggagctggcgtctgtttaccgccgcgcggcggtaacgacttcagataccgagcaatagcggtgatatcgtcattcgagagatactgcaggctgtgctcaaccacgtcgctcatgccgccgaagaccacggatttatcattgcgcccggttttcaggaactcggccagttcggcctcgctccagctccccagcccgtcgcgattttcaccgcgcaggctggaagctacccaaccgtcaatcggcgcattgctacccgccaggtaatcatcgccttcactttcgctaagcgctttttcctgcatcgtcaggctacgcggggtgtggcaggcgccgcagtggccaagcccttccaccaggtaacggccgcgctccagtaccgggtccacctgcggattggcgacaaagtcgctcggggacggagcgaagatgccgcgccagaacgccagcggccagcgcatcgacagcggccacggaatgtccgtgtctttgttggcgacgttaaccggctccacgccgtgcataaagtaggcgtacatggcgcgcatatccgcttcgttgatacgggcgaaggaaggatacggcatcgccggatagagcgttgagccgtctttacgcacgcctttacgcaccgcgtcgtcaaactcttcgaaggtataaccgccaataccgtgcgctttgtccggcgtgatgttggtggaataaatggtgccgatcggtgtttccattggcagaccgccggcaaaaggtttgccctctttaccgttggtgtggcaggccacgcagtcgccggcgcgcgccagatattcgccctgcttaatcagattgctgtccgcaggcgcctcttcggcgaacgccgcgcagcttaacgcaccgagaaccagtgccgataaccattgcattttcatgatttgctttcccttatgcctgcaccaatggacccggatttctcaggtactgttcgcggatagccttcgccgaccagtaggccagcgcggcaacggtccccgtcgggttgtagcccagcccctgtgggaaagcggaagcgccgatgacgaagacgttatgcacgtcccagctctgcagataacggttcactgcactggttttcggatcttcgcccatcaccgcgccgccgttcatatgggtggtctggtagctggtggtgtcaaagtggctattggcgtttttcgggctgccgagcatatatttcggcttcatcgctttggcgatcggcgccatcttatcgaacataaactgcgccatcttgatgtcgttttcctgccagtcgaaggtcatgcgcagcagcggctgaccaaagacgtttttgtagttcggatcgagatcgagatagttctggcgataggactgatgcgcgccgtgggcatccatcgacagatggtgcgtgtaggtgtcggccaccgccgatttccatttactgccccacgccggggtacccggaggcaccggcacgccggagataggcttggtccccgcctggttgacccagaacggcgaaccgccgacgaagcccgccgcgccgtgatcgaagttatcggcgttgaagtcatcgacgccgacgccgttaccgcccgcaccgatgaacgggttggtgaaggtatctttatcgaaaatggccttgatagtggtcatgttctgataggcgaagttacgtccgaccaccccttcgcccgtctcaggattgtacggtttaccgatcccggaaagcagcatcagatgcacgttatggaactggaaggcgccgataatcaccagatccgccggctgttccatttcacggccctgaccgtcgacataggtcacaccggtggcgcgggatttatcgtcggtcagattgaccttcagtacgttggcgttggtacgcagttcaaagcgtttttcctggcgcagcgccggcaggatgttaacgttcggcgaggctttcgaatacatgtagcaggcgtagccgctgcagaaaccgcagaagttacacggccccatctgcgcgccatacgggttggtataggagtcggaggtgtttgcggaaggcaggttatagggatgatagcccacttccagcgccgctttttcaaacagctgcgccgaccaggtatttttctgcgccggtagcgggaaatcgtccgagcgatccggcgcaaaggcgttaccgccgcggcctttaccgacaaccttccctttaaccgaccaggcggtaccggaggtgccaaagactttttccgctttatcgaagaacggttccagttcgtcgtaggtgacgccgaaatcctggatgatcatatcctggggaatgaagtttttgccgtaacgctcttcataatggctgcgcatacgcagttcgatcggatcgacgcggaaatgcacgccggaccagtgcagacccgcgccgccaacgccggtgcccggcaggaaggcggccagttggcgatagggtaccgcctgctggctggtgttgtgacgaatcgtcaccgtgcttttagagagatcctggaacagcttgcggcggatgttataggtcagctcatcgataacctgcggataagcgccgtccggccaggtatcgcgcatcgggccgcgctccagcgcgacgacgttgagccccgcttccgtcagctctttggccatgatcgcgccaacccagccgaagccaacgatcgccacatcggtttttttcaatacggtcgccatgattacgccctctccccattaattgataccggcgggaagggatagcgttcgcctcgttcaacccagtccataaagtcggcgcgcgcgccgggaaaattaatcagcgtccagccgaccatgcctttattgccgccatggatagggtcgctgaagaagccttcgcgggtgttttgcaacagataggagaaaaacagcgaggccggcagctgtttgaactgcgccttgccggattcccacagaccgagcgcctcatcctgctgttcgccgctcagttcagcaaagctcttgtgatactggttttgacaccactcttcggcatcggcgataccgaggttataaatctgttttggtaccagcggcagctggtagcccatctctttcggcacgtcggggttaaatggcccctgcatataccagatggaaccggtggcataaggggtattgagctggcggtcgataaactccggcacaccggcctctttggcaccgggaccgagttcatcggccgggattaagcgagcgacggcggcgttgataaacagccactcgcgatcgttgaagaattgcggcttccagtcgctggatgtcgcgttgccaccggctgagggtgcggaggacgcctgtgccgtggcgctcgccgccacgccaatggcgcccacgctgccgccgccgatgactaccgttggaatcaaggccattgattttactaaaaaatcacgccttgaattgttggttttctcgctcgacataatcacattcctgtcaattaaaaatactgttttgtcgcttacaagcccagcaaatcccgctctggtaccgataccattgaactgttgcgaaacagaccgtctggctttggccaataagacgtacaataaatcgccaatagcgataagatttatagggttatcgtttggatattagacgattctcaacgcaacgcgggaaaatggcgcaaatattcaccgggttgtcacgataagatcgggcatttaataacctgagtgcggtaagtcatgcggaaatttcgcgcctttggttttaccaaagcgccaataaagggtgatatgtatcacatttgttattttttgtttatggtacatggcagattaagcacctgtaaatactcgcttaatgaataattaaacaattcgagctgttaaattagttaatcaccgttgttaattaaatcgatactggttcccttatcaatttaacgacacggtgatgtcgtacagatattcccaaccacaaggagaatttatgttcgatcatgtcaaatttggcgtcagtgattatgccgcgagcaaggcattctttttacaggcgctggcgccgctcggcgtgacgctggcgggcgaaggcgagccggcttacggcgcggagctagccggggcaaacgatgcctctttatgcctctatcaaagcgaagataaacccgcgccgctgcatatcgccttttgcgccgagagccgcgagcaggttgacgccttctggcacgcggcgctggccgccggaggcaaggataacggcgcgccgggattacgacctaattaccacgccaattactacgccgcctttgtcattgcgccagatggacacaatatcgaagcggtgtgtcatctggcgccctgagcaaagtttatcgctgcggaaaaatccacacatcatccgcgggcagcgtcagatgacaatgttcggcatcgcgcagggccgtgccgtaggcgcggatggcaaagtcatcgccctcggtgcggaacagatattcccaccgatcgccgaggtacatgctggtcagcagcggaagttccaggctgttatcctgcggcgagcagtcaaggcgcagccgttcgacgcggatcaccgccgtcgccggctgaccgacgctgaccccctcgcccgcgcggccccatagcgcccagctggcgccttcaactcgcgcgcgtccgtcctccagcgccgtcaccttaccgtgcaggcggttattactgcccataaactcggcggcgaacagggtggccggattgccgtacatctcctgcggcgtcccctgctgttcaatcacgccgttgttaagcaacaaaatgcgatcggagatcgccattgcttcattctgatcgtgggtgaccatcagcgccgacaggcccagcttaataatgagctcgcgcaggaatacccgcgcctcttcgcgcagcttggcgtcgaggttagatagcggctcatccagcagaataaccggtgggttatagaccagcgcccgtcctatggccacgcgctgctgctggccgccggaaagctgatgcggatgccgattaccgagatgtcccagacctagctgctcgagtacgctctgcacccgctgtttaatctcgccgctggccaccttacgcagtttcagcggataggccacgttgtcgaataccgttttatgcggccacagggcgtaggactggaacaccagcccgagattacgctcttccgccgggatctcgctacgcggactgccgtcataaaccacgttattgccgatggtgatccgcccggcggtcggtttctccagcccggcgaccgcacgcaacagcgtggttttcccgctacctgaagggccaagcagcgacaccacttccccgcgtttgagctccatcgacacccctttcagcaccgggttgtcgccataggtcagatgcagattgtctaccgataactcaatcatgtaatttcactccaaagcgcagggcgatacccagaccgactaccaccagcagaatattgataaacgatagcgccgcgacgatatcaatggcgcccgccgcccacagagagaccagcatcgacccgatcgtttcggtgcctggcgacaacaaataaacgccggttgaatattcgcgttcaaagatcaggaacatcagcagccaggagccgataagcccgtagcgcgccagcggaacggtgacgtggcgggtgatttgcccgcgagaggcgccggtgctgcgcgcggcctcctccagctccggcgccacctgcagcagcgttgatgagataaggcgcaggccgtaggccatccacaccaccgtataggccaaccagacgctgaaaatggtgttgcgcagcgcgcgcaattgcacgataaggtgttcgcgcagccagtcggcgaccggcagcgtcgagagccagccgtttttcaatgactgatcgagccacatcggcacaaacagaaacacccacagaaacgccagaccggccaacaggcccggcaccgcgcgcggtaccagcacgctgtagtcgagaaagcgcgtgacgttatccggtttacggtgcatggcgataccgacaaacagatagcacaccaccgccagcgcgccgccgataatcccgatcgccatcgagttgacgatcgcccgcagcagattcggctgctgccagatgttgcggaaagtcgccagcgacagctcatcccataatgaaacgccaacgccccaattggaaataaaggcccgtagcgccacacccagtagcggaacgccgatggtcacggttaaccacgccaccacgaccgcgcccgcgacccaacgccatttccccagcggcaaggcgcgcgactgcgacgctttacctttcatggtcacgaagcgattggcggtacgcatcaaccggcgctgcaacatcaccagcggaatggtaatgcagattaataccaccgcgaccgccgccatcagatggtaagaaggcgttcccaatttatttgtcaacttatagagataggtcgccagtaccatgttgccttccggatcgccgagcaccagcatcaggccaaagacctcaaggccgaggaagaacagcagcacgcaggcgtagagaatggacgggcgtaccatcggcaggctcaccgaggtcatcacctgcagcggcgtggcgccgacggtacgcgccgcctcttccacatccgaaccgacgctacgcagcgccgaggagatataaagataggcatgcgggacgtgcgttaaaccggcgattaccacgatgctgaacatcgagtagatattccacggcacaaaaccaagccacgcctgcgcccactgcgacaggaaaccgaccggcccggcggccaccacgtaaccaaagcccagcaccatcggcgagacgaaaatcggcaccaggatcagcggctcaataaagcgcctgccgggtaaatcggtacgtaccattaaaaaggccagaatgccgcccagcggaatcgcgataatgaccagaccaaaagcgaggataaatccagagcgtaaggccaggtaaaaatccgggtcggtaaaaataaaaccgaaggcttcgaggctccactctttcgagcgggcaaaaaatggtgcggaaagaaaactttgcgccacgataaataatagcggaacgtaaattaccagtgccgctatcaataccaccatgccacgcggtagcccttgccactttctgcgtaaaatgttcatctttaattcccctggcaaagtgcagagataaattatcaagaagagataatgagtacttatttactgaatactgatacgatcattcccccggatacattccaggggaagtttcacaggtaataactttatttcgcagcagcggcgcgccattgcttaataaattccagacgctgtttgggttgcagatattgcagcaggctttcatccaccggaatcggcttcagcgcattgcccagtaatttcgtcatcccgtcgatatcatttttaccttcaatgtcgttgcgaattgacgggatatcgccctgagaggcaagaatcgtttgccctttttccgacagtacatagtcgaaccacagtttcgccgcattaggatgccctgcttccgcggtgataaatgagacgcgggacagcaccagcacgtagtctttcggataggcgatgcctaatgacgggtcagtttttgcgcgcgcttcggcataggagcccagaatgttatagccgatcaggttttcaccggaggagacgcgctccatcatggtgccggtagaggattgcaccgtcaggccgcctttagcgatattcgccaggtcggcaaagtaattgccgtcagccttgctatcctgcaccgccagcataaagccaagccccgatttctcgatatcgtaggtggtgactttgcctttaaatttatcagcctgcccggcgataagtttggccaatgcggtatgtgaatccggcacttcattttgtgggatcagccgtttgttatagataaagaccaccggctcataggttgtgccgtaggctttttgctgccagaccgcccatttcggcagcttgccgacttctggtgaagcatactcttgcgcataatcggtggctaatttcagcgccgtgtccatagaagagctccacaccacgtcgccgctcccgccgccggcagcttgttcactaatataacggttgtacagttcggtgctgttcatatcgttatattcaactttaatcccaggatattgcgcttcaaagcctttaattaacggccctgccgctttggtgtccgttgtggaataaaccacgactttgccctctttcaccccggcatcaacgactttttgataatctgccgggtagccctgcggcacctccgccagcacggagtacgagaagactgtcgtcagtgaaaccactaaaccgccgattttcttatacataaaatcaacccttaagcatcaataattaaacacaaatttaacatatagtgctacaacaccctctgcaacgctgcgggtggggtttttatggcttttgtgacagtggtgtagtttaaaaagtggtgtttatggagtttattcagcgaatagagaaaacagcgagcgaggtcacagattaatgctgcagcgtcacgaagcgattaccgccaatggcaaagcctttatttgcatttcttcaggaccattcgaataaagaaaaacaggcacagtgtcattatccggatggaataataaatataccttttacatattcacttaatattacattcaaaaccattttaccgggcggtttcatcaaaatgaaccatgccaataatctccctattcagtgagagatatttatcgccttgatcttctgcgccttgcggcgcagcatggaacggcaaacgcaacaaaacaacaacatacatcgaggagactatccgtgcctacaggacatcgctttcgccccacggagctacaccacttcgtcactaccttgttcacgcagctgggcagtacgccaaccgaagccgcgctggtcgcagaccacctgatcgctgccaaccttgccggacacgattcacacggcgtcggcatgatcccgagttacgtaaaatcccatagcgaaggatttttgcagcttaaccgtcacgccagcgtgatgaaagacgccggcgccgtcgccacccttgacggtaacgccggcttcggtcaggtcgttgcccatgaagccatgcagttggggattgaaaaagccaaacagcacggcctcgccgcggtagcgctgcgcaatgctcaccatattgggcgcatcggttactgggcggaacagtgtgcggcccaggggttaatatccattcatttcgtcagcgtcgtcggcgatccgatggtggcgccatttcgtggcaaagatagccgcttcggcactaacccgctctgcgtggtcttcccgcgtgaaggccacccgccgctgctgctcgattacgccaccagcgccatcgcttttggcaaaacccgcgtcgcatggcataaaggtgaagcggtgcccgccggctcattgattgattctcgcggcgagccgaccaccgatccggcggtgatgcagacctcaccgcttggcgccctgctcacctttgcccaacataaaggctatgccctggcgacgctgtgcgaagtactcggcggcgcggtctcgggtgggcaaaccacccatcaggacagcctgcagggctgcgtcgacgccatcttcaactgcatgaccaccattatccttagccccgaagccttcgatgcgccgcagatgcagcacgaaaccgaggcctttatcgactggtgtaaacagtcgccgcacgatgccgatacacctattctggcgccgggtgagtgggaagcggccaatcgtcagcagcgactggcaaacggtattccgctcgatgccagtagctggcaggcgatctgcgccgccgcgcggcaggccgggatgtcgcaggatacgttgaaccaactgcagcagaacatggaagtcaacgcttaacctcaatccccgcggggcgatcgtcagccacggcgtcccgcgtcatcgtcacttatgacgacatccatgattttcccgcgtcttcatcaccttcatcccgcgtcatcagcgctatcttcactttggcacgcattatgcaatcgatttgcatcgcacgacgatcgacgtcgcgcgtttgctgacggtagcctgccgggcccggcgcgctatcgccctatcttcactgttaacaggtctgttactgatgaataaaattaccagcgtgtgcccctattgcggggcgggttgtaaactcaaattggttgtcgaaaatgataaaatcattcgcgccgaggccgctgacggcgtcaccaatcaaaaccagctatgcctgaaaggctactacggctgggatttcctcaatgacacgcagcttctcacacctcgcctgaagcagccgatgattcgttatcagaaaggcggcccgttcaccccggtcagttgggaagaagcgattcgctacaccgccgctaagctccgcgagatcaaggccaaatatggcgcgcgcgccatcatgaccaccggatcgtcccgcggcacggggaatgaaaccaattacgtgatgcagaaattcgcccgtgcggtactcaataccaataacgtcgactgctgcgcccgcgtttgccacgggccgtcggtcgccgggctgcaggcttcgctcggcaatggcgcgatgagcaactcgataagcgatattgagaactcaaaatgtctgctggtctttggctataactgcgccgattctcaccctatcgtggcgcgaagggtactgagagcccgcgacaacggcgcgaaaatcatcgtctgcgatccgcgacgcattgaaaccgcccgcatcgccgaccagcatctgcagctcaacaatggcagcaatatggcgctggtcaacgccttcgcctatgtcctgctggaagaagatctttacaatcacgattacgttgagcgttataccgaagggctggaggcctatcgtgaggcggtgaaagactactctcccgaagccgtggaagcactggtcggcgtcccggcgctggccattcgccgggcgatgcgcaccttcgccgccgccccttccgccaccattatgtggggaatgggcgtaacccagttcggccaggcggttgatgtcgtccgcggtctcgccagcctcgcgctgctgaccggcaatctcgggcgggctaacgtcggcgtcggcccggtccgtggacaaaataacgtccagggcgcctgcgatatgggggtgttacccaaccagttcccgggctatcaggacgtcaccgacgccgcggtgcgcgccaaattcgccaatgcctggggcatcgatccggcgctgatggatacgcaaatcggcacccgtatcaccgaagtcccgcataaagcgctggcgggagaaatcaaagcctactacatcatgggcgaggatccgctgcaaaccgaggccgatctgggtctggtacgcaaagggatggaagcgctggatttcgtggtggtgcaggatatttttatgaccaaaacggcggaagtggctgacgtgctgctgccggcgacgtcctggggcgagcacggcggcgtctttacctgcgccgaccgcggcttccagcgtttcgaacaggctattccgcccacaggtaatgtgaaacgcgattgggaaattatcagcctgctggccagcgagatgggctatccgatgcattacgccagtaaccagcaaatctgggatgaaatgcgcgaactctgtccgctgttctacggcgtaacctgggagaaaatgggcgatatgggccacgtgcagtggccgtgcccaacgctcgatcaccccggtacgccatggttgtatcaggataatcactttgatactccatcgggcaaagggcaactgttcgccgcgccgtggcgcgcgccggcggaaacaccggacgatgatttcccgctggtgctctgcacggtgcgcgaagtcggccattactcctgccgttcaatgaccggcaactgcgcggcgctgcagtcgctggcggacgaacctggccggatccagatgcaccctgccgatgccgagcgggcaggtatcggcgatcgtcagctggtatgggtgagttcgcggcgcggcaaagtgatgactcgcgccgatctcagcgagcgaatcaaccccggcgcggtgtatatgacctaccagtggtgggtcggcgcctgtaacgagctgacccaggataatctggatcctatctcgaaaaccccggaaaccaagtactgcgcggtgaaggtagaggctattgccgaccaggactgggcggaacggtacgcgtggacgacctatagcctgatgaaggcgcggttaaaggcggcggctaacgcctgagggtgaattcagggagaggcttagcttctccctgatatctgacgttgaccggattgacataaaaataggtcttctttggcaggacagctgaaaatcttttgtcccgctcagggagctgccagcagggactgaagtataaagccgcccacccgtcctgggacgccggcaaacagggctttcccctgttaggtaagtttagacatggtgtgttttcctcaattcaagcgcatggcatgacggacgctgtcaggtgtttttccagtccacccctggaatgcgcgataaaaggaattgggatcttcgaatccaaggaggaaagcgatctctgcgccggacatcgtggtatttgccaggtagtgtcgggcaaggctctcccgcaccatattgaccagggcgcgaaagttttccccctcctcctcaagccgacgttgaagcgtacgcttactcaagcccagtcgttccgcggccttctcaatggtagccgcgttaccaggcaacagctccagtaagacagcacgcacgcgttccgccgtcgacgccgtcgaatcaagttcactgagccgtcggcgaagatcgggttcgaacgcgtgaaacatgctttcgttgaccgtcaggaatggacgcaaagcatccacagcggcgaaagcgataactggatactctcccttttgcacagatacgccgaagaaattctcgtaacgccggagataacgactggacggaagttgcggcaggataacgcgatgcgccttaatgtgctcacgggtagccagtctggctagtcgcacgaaaaacgcaatctcggccacttgcagcgagtaaggtacctcggtttgtatcgacaaccagcgaggcgtcacgaccagctcgcctgcgtcacccgtattgacttccaggctcatgggcgccaccagttgcttgtatttggcgaggcgctgcaaagcctgtaccagattcgcgctgcacagggcagcgaacagtggtgggttgaaagaatcagccgagagagtctcgacgaggcgtaagggaaacatggcatcacttgcctcagcctctaaagcgcgccagaaacgaaaatagtcttcgccagaaagcccctgtcttgtacgggagagtaaatcgtctggaaggccggcccgacgtaatacatggccaggctgaacacctaagtccttcagtattgccagccagccaatatccatgggaaaagttttgttttgcaccttcagaactccgtcactattgctcattcaaccgacgctcagagtatagagcagtcgtgcgcttaacccccgtcaaaccgcgccacaatgactgcacgttgcgccaatctgtaacatccgcgactcaactccctgtgctggcatctctcgcattaaaattggcgcggattgccagagcgttgtcgtggcttgcttcctatagtgagatgtaaacatcacaccagccaggacacgttccacctgtcctggcggtccaatctgaacaatagagaaattcccatgaatgctaccgaagctatcgaccaactggatccccaaaaatggaccacaacatctcccgcagaacgtttgcgtctgctggaggaagtccgtgcaaacctgaagaagtacggtgatgacctcgccttcgccgacagcaagatgaagaatggcatcctcggtgcgcctcttttttcatacccaatgtctaaggttgctaccgtcgttcctatggcgagtaccgtctcggcagccatcatcctttatgaatccattctcgacggcaagatgccacagccgctgagtgtggaaaaagtgagtgaggatctctacgacatttatgtctttccgcaggagcggaaggacaagttgatgtacgcggatcagaagagtcgcatccgtgtgaaaggcgcaccgaaacaaatcaatccgatggaaaagcccgcgggtattattgccgtgctgggtgccggtaactacagctcagcgctcgaggtgttgaaagcgatcttcttcgagaactgtgcggtcgtacacaaaccgcatcacctgaacgaagaaaccgacaggatttgggcaaagatcatgcagccgctgattgatcggcgcgttctgagcttctgcgatgccgatcggggacatgatctgacagtagacccccgcctctcgaggatctactttactggtggaaccgcgacggccgaggctatcatgtcagcgacagagacgccgctgatctccgaatgcggcggtaataacccatgcatcatcgtgccgggcgaccggccatggacaaagaaggaaattgagcaccaggcagtgcagatagccaccatggcaaagttcaatggtggcgcgaactgcggtcgtccccaaacactggtgacaagcaagcactggccgcagcgcaaggaattcctcgacgcgctgcgggtcgctatctcggagactactccggccatgggtatgtactaccctggcgccgacaaggtcgtggatggttttcgacaggcctatcccgatgcggaagtactgagccccgagggcggcaagtatccgcataccgatgtcatattactcacagacgttgagcccggtggctacgccacttcacatgaagcgttcagcctggtgctcgctgaagtgccgcttgacctgccagccaatgccgcgcactttctccccggcgccgtcaagttcgccaacacccagctcctgggcacgctcgccagtgcgatacttatcgatgaggacaccagaaaggcccatcagaaattacttgagcaggcggtgtctgacctggaatatggtgcggtcgccatcaacagcatgccgtccttcatttttctcaacccctatctgacctggggtggaaatgaggcaggcaagacgttcgtttctggtcgcggcaactttggcaacctactcaattacgagaacgttgagaaatcgatcatggaggcaaagtttatgtcaccagggcacatgctctacaccaacaagcgagcgttcgacaatatggctggaaacatggcgaatttcgcagtcgagcctacctggatgaacctgacctgtctgatgggggacgccatccgcgatagcttccgtaaaaaagatttctgagtcagtagaacgcatcggcctgaaaggcattatccattgccccttactcgactatcttctagcgagtcggcttcgtagcctgagcagtgaatgtgaccttgaggacatgcatagggtgagctccacaacaataaatcggaactcatcgcggctttccatacgctcgaacggcttgtacgccagttcgagcgctatcaggccagagccggtcgtggcattctgcgcctgaaagtaagtctagcaacgatagacttgacgacatcatcactattgtgaatttaattataccatagtaaattacgtggattcattttgtaggttattacccaaaaacatgtccattttaaggaaaaaagatgataaaaatcagaatgtcacgaccttctgaagcggaagacatcatccaaatttggaaaagttctgtcgatgctacgcatgattttctgacagctcacgaccggcaagagatcgaaaaagaggtggtcggctttttttcggaaacccctgtatgggtagcgacaaatgatgaagaccagccactcggatttatgtttttacatgatggtcacctggaggccctgttcgtagatgctgctgctcgcgggcttggcgtcggaaaacagttgatatcccatgcccttgctcttcatcctgatttaagcgtcgacgtcaatgaacaaaaccaacaggctgtcgggttttatcaccatatgggctttcaggtttcagggcgctccgggcaggatagtcagggaagaccttatcccctgctgcacctgcgtaaagggcatggcgtctaaccgtttgccagggaaatatcatctgtttttttggctaaacgcaacgatatatgtacagctctgttcgctatccgggttggtcatttggcactcgcctgcaaaggtaagagcaagacagtcacccgcttgcaaatgatgagtctgatgattgaccctaaaatcaaggttgccgctcagcatccaaagtgtttgcccgcaaagatgctcaatagcggaagcggggatcgtcagttgccccagtgcagggatttcaacttttatcagttccggactggcgcccgccggggacaatgtccaacgaataatgcctgattgttcatctgtccaatgctgctgctggtgagcgaagcgaaccagcgaattctgatgttcctcaagctcggcgaaaagttttgatagcgtaatattcatggcgttggctaaccgacttaggatagtcgcactgggactggagacgcctcgttcaatcttactaatcatcgcctggctgacgcctgagcgttgagcaagttccgttaccgtccagttacgagctttcctgtgctttagtaataactgtgcaatgtcgctatctactatctgatttttctctgttttatccatttcaccctcactttcgccagcctgattatgccattacctaaattaggctggaatcaatgattgtgtcagtgtgaaaaagtcaggtttcaatggatggacaattatctttagcacccacgtcatcagaagagcatgagtttgcgatgcgcactccaggcacaacgcggataagttaatccgagttcttcgtttcatagcaacgtcccccccttgattaaggatagcgttgcatcgacccgttgaactcacagcgaggagtgaacattgtgcttaaataatgatgactctggcaggatgggttttcaatgcctggaaggtagccactaattcaggtgacgtaaatgtgtagcaatcccccactttaggccaatacattttccattaatcaggtcgataacagaataacttgcattgggatgagcatagcgagggaaactatcgacagtcccttctttaagaattgccagagtgccctgactgacatgcccgtgagacacaatacatattgtttgttgatgtgatgaggtatcttccaggttttgtaaaaaacgcataactcgctgagaagcatgcgccagtgactccccccctggtggacaatactctgcatcaagcctgaataatgcatttgcatagtttggatgtttttgtctgagtagttctaacggcataccttcaaactgaccaaaggcctgctctttaagggccggttcagccgtcagtgaacaatgaaagtgttcagccaggctttgccccatttgccaggcacgcccaagcggagaagcgtaaacacgctctatttgatactcacttgcactaaacgctgctagtaggagggatgtttcacgcaaaccccgacaggtcaaggagctatcgctgtgcccctgaataattccttcccaattccactctgtttctgcgtgtcgaacaagtatcaatttcatcgttagctggccatgctcgttgttgatcaaaatgtcccaactgcgcgatgtcaaacacacaccgttgaagcagcggaaggctttcctgttgtggaaataatgaacaagtgtagcttattgccgttatgcagcggctctgagtgtggggcgctgaattttatccgtagttaacttccgcttttggcacggagcggacgtgttaacgaagctgaaggtccgctgggagcgcttagcggacatgccatcagcttatcagccacctttacgagcattccattcatcacgtgtgatttcccatagctcggaatccagcagaccgctgacatatgctttcttttcagtcctaatgagccgcatgccactgctttgtgagatacgtttggagcggttattgagagccgctttcggcgcacgcaatatagtcttatttaaggaattgaaccaataatctgtagctgcgttacaggcctcacgcataaaacctttgccctgatgctccggtgctaaccaaaatcctcggttgttatcctcaacatcataaagacagattaaacctaccatgttgtcaggtgtttcacgatgcctaatagtccagatccaagcgattccatttgctatatcaggcaaggcaacgttattgacataattctcggcgccattatccggatagggccacggtactgatgagaccatgtaccgaacaatctcccagcgaggataaagtatctgaatttgtgaggcatcttctgaggataatggttttaacagtaagcgttctgtatagagaataggtattggcatcagcacttttccttcctgaacttagtgtctattactgtttaagccattaaatagctatctcaatgtatcttgatgtacagaaaatatctatacaataggaggcgcggttaacaagcagtcaggggcagtttttggcactgcgcggatgaaccaactgagtttaagctccagtctgagcgaagagcaaaccacactatctgaggtaacgtattactgttaatggtgaccccattaacgctaatattattattacttttttcatcaacggttaggcagatacattaatggttaagcttagggaaatagaaatgaaatatccaggcgcaggggcctggcaaatgggagacagtccagaactggcaagcgagcttgctaaccttattaaaaaaggaatcaaaacggcctcttgtggatcttttgcctcttaccaacaggaagaatctgctccgaggattggcagctataacataattcttgatggacagaatgtcccggtatgcgtgatccggctggtttcgctacaattggtgcgtttttgcgatattaatgaggagttcgctcgcaaagagggtgaaggcgatttaagtcttgaatactggaagaaagagcatcagcgatttttcatccgtgaaggtcatttttctgaggatatggagttgatcgcagaagaattcgaagtggttgaggtgctgtaatcggagataaaattgctgatgtttatctatcacccttttcataaacgtccgctcctggcacgaagcggtcagcatgcaggatcaccagaactgtaatgacaaaagaagatgttgtcctctaacgaatgcaggatttattctctgcctttcttattcgaagtaatataacgtgtggtttgattgacattactggaggtataacatgttggtttataatgtctttggtcgataccttggcattctgcgtaagaatgagtgctggttggtttttcgagtagatctgacagaaagaaagtattcccgtatctatgacgttgttattccagatgatctggcagaagatgaaattgcaggctggttagatgatattttccatgaagctgcaaccgaacgtcatccagatgttaaacgcatcgaataattaattgatcaaattatcaatatccgcttctggcgcgacgcggactgcctgaatagccgtacgatctctatgaatgaaaggtggagtttagcttctcgggcctgtttatacacaatcgggctggctgtattgtaacgtccgaaaaatctggtaaaacattgctacacaaaattctttactatcaagattcgtgaaggccgtattgaaccggccttatgtgattttcagactgaattactgacccgagagaatcgaagccggaacaagcggcacggagctcaacttattaacgaaccttcaggttgagaatggaggttatgggtgcttgccctcttccagcaggccatttaccagcagggtgaaaacctgaatcgcttttggtaaagcatgctgcggatcttcactggcagccacccactgagcggcattcagtgcagctccatttaacagccaggcggtagcatccacatctaccggcttgattaagccgcgttcaatcagatctgaaatgttctctcgggtggcgtcaaggcagtaattctgactcggccatttcgtaggatcgccaagaaaagccgggccatcaagcagaacgatacgccggacttcttcatccagagccattctgatataggctatcccttcagccagaagcttttgctggtcatccctgaactgtgtcgctgcactcttggcactttgtgccatttctgagtcaatctgggcaaccacagcggcaagcaacccttttttgtccccaaaattatggtacagagccccacgcgtcaggccaacgctggcagtcaaatcatccattgatgctgctgcaaaccctttttcggcaaaggcttttcgtgcggctgtaatcaacttcgtgcgggtttcttccatcgtttcggcgcggcgtttggcagccatgcggactccttgcaatatacgcagcgtatgaaatttgacatacgccgcgtatgtgtggttaagtttacatacactgcgtatattaattgatttatttatgtcacgcacggcttcacacatccgaaaaaaggatacgttatgaaccaaccgaaacctgttttcccggcgaatcgccacgctctctatgagaagcatggttattctgctgcgatccgctctggtgatttactgtttgtatccggtcaggtgggtagccgggaagatggtagtcctgagcccgactttgcaacgcaggtagaacgtgcctttgaaaacctcaaggccactcttaccgccgcaggatgttcgtttgaagatcttatcgatgtgacaacctttcataccgatccggagagtcagttttcaaccattatgcaggtaaaacaaaccgtttttcagaagccgccatatcccaactggacagccgtgggggttaactggctggcgggatttgattttgagataaaggttatcgcccggattccggaacatcagctttaaaaagttcacacacagatatcaggaggcctgatatctgtgtgtaaatctgtttttgacacaaaagtggctcgataaaacctaggttaaaaagttaaattattcgcctgtatcaaggttaaactgtaaagggtagtccatacaagccggctccttcacctgactgtttccgataccatgttgcctgtgtgccatcctctccattacctgatattgctgatgcctggccgccgttgcacatgcgtggttaggaagaatccgtatccattttaattcaacacacttttgagagcttgttaaatacctcagggcatgaagcgggcattttaacatttaaaattctcttaccttacgttacctaaaccccgatcgctctccacaccttgaagcattagcgtcgcttcttcgacacgaataaagcgcccgtcatcatctgtttcagcgaacatataaacttccatatccacctcttcaccattatgcttggtacacaaaacgcgatgcctggtggcatagagattcccgtcacgaagctcatcgcaaacttctattttgccggatgcgatgatttcccggagtttacgtgcatgctgagcaaagccatccaaaccttcccactcgttattagtacgctggcggtaaacgggactgaaatgacgattgagtatcaggtccagtggcacctcctgttgattgagaatttcatccagcacggtagtaatagtcattattttcatgggtgatcctctgtgaaagtgatgaatactttacaatcgactgaatggcttaagtacggtataaaagacataaaataccgtaaacaagtcaaaatgaatgatccattaattacattcgagccggccttcgcttcagaggggcaaactttagtcgtcgcggtacgcgagtctgatgtaatacgggaaacgccaaatcaccatcacagctgtggacagctactcggttcgaggcatgggctactcacggtcgatgccggaaattgtcgctgggtggtaccggcgacacatgccgtctggatacctccggatgttccgcacggcctgcgctcgcatggcccgtattcaggatggagtgtttatgtatctgcccaagcctgtagcggactacctgataagccttgtgttctctcaataacaaatctgctgcgtgaagcgataacgcgagcggcctcatggaaagatgtaaaccttaacgcgtcccaaaaacgtttagctggtgtcatccttgatgaaattggctctcttcctgaggtcaacctggggctttcaatgccccaggatatccgactactcagaattgcgcagacactgtcagataacccggacgacgaccgcaggctcgaggaatgggcagtctgggccggaatgtcatcacgtacgcttacacggcgattccgtgcagaaaccggttttagttttaatgaatggcgacaacgcattcggttactcaggtctcttgaacttctggctgcgggtaagccagtgacggcaattgctctggaccttggatatgataacgtgagtgccttcattgccctgttccgacggatattcggcaccaccccgggacgttttaaaatttaaacctctaactctgcagccccacactatatatttaaacatggcagtgacattgcaaaatcacagcgacagagaatcaggaatatttctggctcttctcaaagagtggcaatcagtactgacgatacatattccacagtgtctgcatgcagcaggctctttttgagagtgaagctcagggtttactgcagaatagataaagtacagtgtaaaacccaggctggcgacagcaccgagacggcacatataaaacggaatcgccctatccctcggccagccaaactccgtgcccgactttgttatagcggacctgtactcaagatggttcaggatgaaatctgagcatgactgccacgattacgtcagtgagtagactgctttgtcctgcttttttatggcctgccagtacgtcagcgtagtgttcttaacgtaacatcacacctctgttccacctggccaattcagtcaacgactacgaggtggcaaataatgttgaccgcctgtgaggccgctgcgatacatctcccttgtatgcattgacaaaagcacatacttgttatatttgcattatttatcataggttaaatttgaggattgttcgtgatgtgatgctccgtacataagcccataacattatttttaactgcctaccagaaaggatgtattgcctggctgaaagctagcacgcatcaggtaagcaaagacttgtttagcttatacggacatcaagaatgattcgagcactcatgaatgccctggtaggaaagccatggctgatgttacttggtatatctttcattatttcctctgtcgggaatggcattacctatattgttgtttttagcgaactgattcggctcgctgccccgacaacctcccttgctttagcgtatgtgctttcaactgttcctggcttaatcggaagtaaggttggagagtattattgccgtactggcaaccctttctccattcttgtcgtgggcgaatttttaggcatggcaggcttgagcgccccttttatggctgtgttaaacggctcaattcctctttttcttatcgcacaaaccgtgtcagccttcatcatcggcatgacgttccctgctatgagtaagatatttaaaaccgggttaagtgaaaaggaattacccgttgcgaccacactggaaaccattatctttgcatgtaatgttatttttggtgttggactgggtttgttactattggggcatgttaccgtaatacacctgctgatcattgacctggccagctacgccctgtcagtcatcatgctattgagcgctaaaggcaagttcaggaatattttccattatatagaacaaaaagatgcagttataagatggaaagaaatcagtaacactcagaaacgaggtatcctgctattacccctattggcattcgcaggagccccggcgatggcgttactgccagggctggttccaacgaatcttacctgtcatgaagctcaagcaacagctttggctcttcttttctctcgtagtttagggcaactcatcggcccgttactgcttaatcctgagcgttttgagaaaaatagtaataataatagcctgctattgggatgtctgtttatttttgtggcatgctatggcctgatccctttttcaacctcatcttacctggcattggcactggtctttattgcacatattttttcaaatgttgttttctcgctcgcggtatattcagtattgaaaaaatttgatgaaaatcatgtggctgctgctatggctaagagctaccgatggcagatgatgatcactgcaatagtctctataggtgccgggtatagttcggattaccttggggtaatatacgcgctttatgccttcagtggctcaggctttttgctaattgtaatcttctcatttgtcgaaaaatatttttctccaaagacacggtcaaacaacctcgagctggaatagtagaaaggctacacagcctgagggctgtgtagccttataaattaaaataattcaatcgcctgaatcccctgattcacgctttcgtctccggaatatcgcctcgcaagataatgaagacatcctattgcacgaaagcgtgcaggagcatggggaccgctggttaacaacttacgcatgatattttcagaggcatattcacgccagagcattaacagactggtctggaaagcttcacgtaattcactagtttcttcctgagacagcctctgaagcgttttccaggcaatatcgcaaccagataaatcagccaagcattctcccttggtcagaagcccattaatgtagtttccgggaaggacttctatattgctgtaaaaatcagcgattacatttgctttttgaataaaattagcttcatcctgttgtgtccatagcatgtttaaatttccattttcgtcaaaatagcaaccttcatcgtcgagagcatgacttatttcatgggcaataataattccgatagagccatagttatatctgatcccgaggttgctcataagcaatggtgactgtaagacagcagaggggagtatgatttcatttttacgtctgttgtagcaagcattaacttcatatccgtacatgtcacagaggtgagggttaaaaggtccattcaggcaatcactttaatgcctgaacttttcctcttttattgctagtactgtttctagcggggtcgaaaatgaatggttacgcaggcaaggacgaagcccgacagcaaattaatggttacatattgaactactacaacagcgtcagacctcaccattataacggtgggttgacgccggaagagtctgagaacaggtaccatttttactgtaaaaccgtggccaatattacttgaccactacacgtataccagtgggaactcaatcagaatgataaaaaaattacccatcgtcctgaaggacaatgggccttttctgacagctatatggaggcagaagccgcccggttgggcctaggattggcctatgttcctgttgaactgatagcggatgatttagaacacggtaaacttatcagggtgttgcagcgttacagcctgcgaatggagggattgtttctctattatcctcatcgcaacgtctcccctgccctgcggatggtcattgatacgttgaagatctgagagttaacgatgaccgcccattcactgtgcagaaatgtgttagttagcccatctgctttcaattccaggcccgctttgagcgaaaagcagacgctagtgtttaaccgtcgtctacttaatgttgccattatccttttcaaacggacgatattcttctgataattacatcgacacattctgtgtgctgataaaattgctgtatctaattgcagatgctctcgttcccatggttcatagttacggcattgtacttgttcccagttaggagtggttaaccccgggatatctgagattctgttctccacacgataacgatgctgtgtcatatctgaacaaagtatttcaacttctaagaacggaacatttaacgatatcgctacatcacgaaaagtattacgtatcagattgatatcattaaccgaatcggtgacaacagtagcccctaactgtagattttcacgcgccaactcataaagaacaaaataaccctcagggccaatttttttgttctgttcagatactgaacgaatcgcctgctcaaccgtatcaacccgtagatacacagcattaattttttgggataacaattttgcaactgtacttttaccgctaccaggtaaaccattaaatataattaacataatttatccatcgatggttgagctaaagttataactttttatatacgccctaagtatttctaatatttgggaagttctgtatagataaaccttaaatcagatttgagaattattacagtatttgaacaacgattgcattaatcgatgtccgctcctggcactaagcggaccgcctgaagcattgcgaggtttgctgtgagcgaacagcggtcggcccatccagcgtaggaacgtaaaaaaaccgcggtgaggcggtttagctgtctagttaggaagttgcgcttgcgagtcgtgcggcaaatccgatgaagaacatacccaccagcgcgtttccaatggttgataatctacggttgcctttcaaacggcttagcagataagagccgcagaaaacaaggaaaccgaaatagacaagagtaatcgcgaacattaccgcagcaagaatgataaacgccatccaggaatgttcagcctgaacattgatgaactgggcgaagaaagagatatagaacagcagtgtctttggattcagtagcgtaaccagcattccacgcccgataatccccttagcatcagctgaagatttcttttcctcactcgtttcgacagtgggcttaaagatagcgcgtatcgtctggacaccgagatagaaaagataggcagcacctgcgtatttgatggcgttaaataaggctggagttgagcttatgactgcggccagcccacaccatgccagcagaaccagaagtacgtcactcatcagaatggaaaatattgcagcaaagccttgtttgacgccgctcgtaatgcttgttttgatcacgaacatggtctcagggccaggagcaagcactatcagtgtcgcaccaagcagatacgtccagaaattcacgataccaaaatcagcaaacatttttactccagttctctcgtttttatcgaggctattctaacgtaaccagcgttaatgaaaacataacggctgctttctactcagccaatttccacttttggcatagcgctgacgagcaaatgtttattaagactgaatagcgaatttcggacggattaacaggcgtacatttttattacggtatgtaacatggctctggtattgaaaaccaaatcgctcagctaaataatttgaacgttggttttcttccgcaataatacagcataccggggaggtaaatgtctggtctgcccaacctaaaatcgctgccaatgcttcattggcgtaaccctttccgcgcatttcagcgatgattttccatcccgcttctggatattttaatgttggctcagtattgcgatgcgcatcctgaaacccaaacgcgccaatataaagatgtgttgctttttcaaaaacagcccagtatccataacctaaagcttgccagtgacctatgtaacgtaacaagcgggcccatactgcttctgccgtgggaacttctccgccatttatcttaaccatttctggatcagcccagcatgcctgaagagcggaaaaatcctctaacgtgaaatgttttaaaattaagcgctcagtctctagctgaggtgcctgctgaaaaatcattatatccccttgaatagtcaggttacatagtctggtttattagaataaattgcagccagcctatagcattaacataaaatcaacaatgtcttcttcccacaataaatcatttgtacgcatcactaacggcaatcggtcaatataaatgatgctccagaactaaactgtccgctcctggtacaaagcgaaccaaccaactgaatttaaaatcctgtctgagcgagaagcggacacaggatttaccggttctgtataacctaacggatagattttgatactatgccggacccgctaaacaacatgcggatacccaggccaatcatgacaacacctgtaaatcgttcctgccatttgataacgcctgggtgtttacctagccagttaccaaatgtgcctgatgccatcgcgactgaccccagagacacgattcctgccagcttttggatactgccaaggacaagcaattgcagccaaactggacccgctgcgggatcaacaaattgaggaagaaaagcaaacatgaacagcagggattttgggttagtcaggctgttcagagcgccttccttaacggcattccagtcagaaatttttgccgtttttcgcagccgcgtatcagtacctgaagtcgcaatcatttttatgcccagccacatcagataagccgcaccgacccaccgtaacagatccagcgcaaccggccaggcatgaacaacggttaccagcccgaggacaagaaaagaaacttgcacaaaacctgctacaaatacattgcccaggaccgtaagcagcgcaatacgtcttccctgaccgacacctctggcgatagtcagcatcatatctggcccaggagaaatctccagcagcgtcagcgcgagaaggaaagttataaacgtttcgatggaaggcatcgtgattgagtccagaaaaatattttcgctacgttacctcagtccgattcatgccgaaagcggaatatattgcagcctccgcctgtggcactacacagacatttcaactctcagtgatgcggcagcattttgtccttttgatcaaattacgccccactaccgacccgaaggccggtagctgttgatacaacctattaccacgcgttatttcaggttgttgcggaaaaagtccgtcagcttgtcgaaggggatcacatccgtgcggtcatacagatcgacgtgccctgcccccggaacgacatacagctctttaggttgaccggcgcgcttaaaagcgtcctcgctgaactcttttgaatgggcctggtcaccggtaataaagagcatcggacgcggcgaaatggtttcaatatcattgaacgggtagaagttcataaacttaccgatactgctcagcatcggttttgtcgtcagttcctctttctcgccctgcggggtataaccgccgcgttcggtacggtagaaatcaaagaactcgcgctgaatttccggcgtggaagcgtccagcttattcaccgtgcccggaatgtatgctttctctcctcctttgaactcggcaaaccgctgctcaatggccgactggataaaggccttacgctgttccagcgtttgggagtggttaaggccgttacggaacgcggagcccatgtcatacatgctgacggtggcgatagctttcatacgcgggtcaattttcgcggcgctgatgacaaaacttccgctgccgcagatgcccagcacgccgatattatctggatcaataaacgattgtgtactaaggtaatccaccgccgcgctgaaatcatccgcgtagatttccggtgaaatcaggtgccccggcttgccttcgctttccccccagaacgagagatcgatcgccagcgtaacaaacccctgctccgccagcctctgcgcatacaggtttgcgctttgttccttgaccgcgcccattggatgacctacgacgatcgccgggtttttggcgttctgatttaacgttttcggcataaacagattgccgaccacgttcatttgatactgatttttaaaagtgactttctgctgcgtcactttttcgcttttataaaagttatcagcgcctctggacatatccgccgccgaggcggcaaatgcgctgatgaacattcccagggctaacgcaaatttattcatgatagtttccttgtcaggacgagtgtgatgaaagaccatcggcagaggcgtctgcacgtgaggtcaggaaaatcagtacggttgcgataatcaacatcgcggcgctagccagaaaggtgctctggtagccatgatggtcgaacagcacgccccccacggtggatcccagcgctatggacaactgcaccatcgccaccatcagcccgccgcccgcttcggcattctgcgggaacgtgcgtggaacccatgcccaccatcccacgggcgcggcggttgaaataaacccccacagcccgagcaaggccgtcacgatggccgcctggctgccaaacgcgatcagggccagcgcgacggtcgccatcagcacaggaatggccattagcgtcgggtagaatccgcgcttcaatacccggccaatcagcgtggtgccgatgaaacctgcgctcccgatgaccagcaagatgagagtcaccgctgaggcgtccaccttcgtgaccgtctcaaggaaaggccggatataggtaaagagcgtgaactgccccataaagaagatccccacaccgagcatgcccaacgtgaccactcgacggcgtaacagtgcaaagacgttgccggcccccgctggctggcgggtaaccggcatcgagggcaggctgagcagttgccagataaacgcgacgatggcgacgggtaacaggcacaaaaaggctccccgccagccgatgacggaacccagccagctgcctagaggcgcggccacaacggttgccagcgcgttgccgctgttaaaaatggccagggccagcggaacacggtgcaccggcaccaggcgcatcgctgttgccgccgacattgaccagaaaccgccgaccacgatgccaatcagggcccggccggtcatataggtcaggtaattaggtgccatcgcaatgacgccccccgaaagtgccatgatgcacgtcaggccaagcagcaggtttttccggttaagcgtgcctgccagtcgggaaataaacaggctggtcaccaccgcaaacgcgccggaaatagcgatcccctgcccggccatgccttcagtgacgtttagggactgcgccatcgatgtcagaaggctgaccggcataaactcggaggcgattagggcgaatacgcacagcgtcatagcaaacacgccgccccagtgcgcctgttgtttttcacttgctccgttctggtttttggtttcagttttctgattacgcatttagcctttcttttccgttgataatggaatgcccttccccttctgaaacggcgacgtgggggataagcgcgtgagttaaagagaacgatggatatggaaggcgcgacggctcaatccgcagccctgagcccggcagagaggagcatcagcagggacgtcttacggtgagcattttccatctcgtttagcgttgactttttcatcgcattattgttaccaataggcagcggtgaaactagctaatgaatgcttaacagccttataagtaaaatttataaatagcccggaaaccaatatggcaagacgcaacctcaacgatttactctctttcgtcaccgtggcgcgggaaggcagcttcacgcgtgccgccgcgcagcttggcgtgacccagcctgcgctgagccaggcgatttccgggctggaagagcgaatgcaaatccgcctgctgacgcggaccacccgcagtgtgtccccgacggcggccggggaacgcctgttgcaatcggtgggccatcgtattgatgagatagaggctgagctggacatgctgactgaactgcgggacaagcctgcaggaatcgtccgcatcacctgcgggccgaacgtgctgaaaacgactctgctgcccaagctggcgccgctgctccgcgaatatccggatattcatattgagttcgatgctaatcacggattccgggatatcgtggcggatcggtttgatgcgggcgtgcggcttggcgatacgattgataaagatatgatagcgatgccaatcggcccgaaactgcgcatggcagcagccgcctcgccagattatttcgcacgatacccggtgccgaaaacgcctcatgatctgacgcagcatcagtgtattaatatgcgcatggtccgctccggcgggatttatgtctgggaattcgatcacgagggaggagagttgaaggtccgggttaatggacagttgacgtttaacacgtcggatcatgttgtcgacgccgccctggcagggttaggcatcgcctttttacctgaagaggaattcggctcacacatcagagaaggtcgtctcgtacgcgtgcttgagtcctggtgtcatccttttccgggctactatctttattatcccagccgcaaacagccttccccagccttctcactcgttgttgatgcgctgcgcatgaacgggaaactttaggtttaagattttttcgctgtatcagaatggacttatcaaatgaccagaacagagaggcttctcgagttactacagatattaagagcgcaaagatatcccatcacggcatccacgctctcagaaagattagggataagcgtacgttcactttatagagatataaaaacgctgcagcatcaaggggtgcgcattgaaggtggggccggaatgggttatatcgttaagtctgactttcatttgccacccttaaatttttcgcatgaagaaatcaatgctattacccttgggctaaattgggtatctcataacacagatgatgatttcaaaaacacagcaaggaatgcgcttgctaaaatacacgccgtcatccccgacgaattaaaaagccttatcgaaagccaatcttatttaatcggcccttcagaaagtaatgaggtctttttcaaagacattcgcgatgctattaaaaagcaaaagagagtccaaataaaatattgtgacaagaaaggcactgactcttctcgtgttatatggcccatcggattggcatatatgcagtcatgttggcttttggtcgcatggtgtgagatgagaaatgattttcgtcattttagaactgacaaaattgcagagatggcacaactggactctatatacagggaaagccggatggctttattgaaaaaatggagaataaaagaaggaatcgccgaggagaaagagtactgacaaaaactgtcacagctattttgtatactcccccagatgcaagactcaattctacgtcatagggggaaggatgaatttccagaataaagttgctgtcatcacaggaagcacgacagggataggtgaggcagtcgcagagcaattacaccaacatggtgctaaggtcgttattgtctcccgctcgccagagcaggccatcaaaaaagcgaaacaattatcttcacaggggcaacaggcgctggggatcggatgcgatgtgtcgcaacctgaacaagtacagaaaatgattgctgaagtgatcaaacatttcggcggacttgattatgctgtaaataatgcgggcataacaggtgagcatggtaaaaatataacagaacagacggttgaaaactgggacaaagttattgccacttcattgagcggcgttttttactgcctaaaatacgaaatacctgcaatgatgaagtttggcggctctatcgttaatttatctgcagtcaatggtctggttggtattccaggattagcgccctacaccgtggctaaacacggtatcatcggtttgacccaaaccgcagcattagagtttgcaacgcaaggcattcgaatcaatgccgtcgctccgggctatgtccaaacgccacgaatgagtgaatttcctgacaatatcgtacgtagtttcgccaatagccaccctatgaagaggatggcaaaaatgcgggaaatagcagacttcatactgtttttgctgtcagaaaatgcggcgttctgtaccggcggcgtttatcccatcgatggtggttatttagctgagtgaaactccccccagtgcttttaaactgcaagagtttcataaggctttaacgtcggctatgtcgaggtgtgaacctcatacagttcgacgttaaccctggggaaccgctcattcccgttcttctatccagctcacaagctccgcaaactgagcttctgaaaataccgcgatgccatgctcactgagcagtgacgccgccactcccatacccgatttacgctgattactgaaagaaccattatagataaactgactgccgcacgtaggactaccatcagttaacaatgcggcggtacaacctgcttcttgtgctgctcgcagagccagccaggctgccagttgataatgcggcgtaacatcccttcccgtattttcaattattctggcttgtccactcattacgtctctcccatcagccgacacgatctcggcaggtggtcgcggaacaggtagcccggcagccagctcaggacagtggattaccaggcgctgctcccgttgccagcgagcaagttgatgggtcatctgcgctttctcttttccgttataacggactttaaggcccatcaggcaggcactgaccaatattttatttatcatttctttgttggcccccggagaccgttcacccgcgctttccgcggcacacgaaaacttagccctgcccggcaggcagcagtgattccaccagcgccgtccacagcgccacgccgggcgccagtagatcgtcgttaaaatcgtagctggcattgtgtagcggcctggagggcgtctcgccgtctgtgcctatccagaaataggcgccgggacacacttccagcatgcaggcaaaatcctccgacgccatggaaggattgatctgccagcgcaccgcggcttcgccgagctcggcctgcgccacctcgcgcaccttcagcgcctgttgcgcatcatttttggtcaccggatagcccggataccacgcaatctgaccgtcaacgtcggaaacctgcggctgcgtatgcacgtactgctcaatgaggttttttacccgctcgcgcaccgtattgctcaggcagcgaaaagtcccgcgcaacaccacgcggtccggcagcacgttgatcgcctcaccgccgttgatctgggtaatgctgaccaccgcggaatcctgcggcgacaggcggcgcgacggaatcgtctgcaacgccataatcagctgtgcggcggcgacgatagggtcggcgccgctttccggcatcgccgcatggcagcttttaccggtgagcgttatctcgaaggcgtcaagcgaggccatcattgccccgggattcaccgccacatgccccagcggtaagcctggccagttgtgcaacgcgtaaatggcgtccatcgggaagcgctcgaacaacccctcttccaccattttgcgcgcgccgccgaggttctcctccgcgggctgaaagacaaaatgcacggtgccgccaaagttgcgggtctgggcaaggtgcgcggcggcagccaacagcatggcggtgtggccgtcatgaccgcaggcatgcatcacgccagcacgacgcgaacgatattccaccgtcccctgttcagcgatcggtagcgcatccatatcggcgcgcaggccaatcaccggccccgggccgttctcaagcgtcgcgacgaccccggtacctgccagcccgacatgtacctgcaggccgaacgaagccagtagcccagcaacccgacgcgaggtctcctgctcctggtacccgagctccggatgagcatgaaaatcgcgacgccagccgatagcttcggcaatcagtgaagacgataccgccatgtcctgttccttccattactgaatgagtggtccccgtcctgctgcttccaggcggcacccttcgttatatcctttcgcccccgcggctgacaacttcagcgatgatgatttttgtctattcaccagcggatcgttttatcgatatcaaaaatagtagctatttcagcggtgacttccgtcagctgattaattatcatgcagactggtcggcgtcttgccggattatccacctgcaaccttccgttatcgggaatacaatgtttaacccagaccagaatcgcctggcccccacgctggcgatgatcatggccgcttcacttgtgggatttattaccggctatacagtgccattaatcagccttgagctggcgcagcagcaagttgctccgctttatgtcggcctgctggccgcgctgccgcccgctggaatgatgctctcttcttttctttctcccgcgctgtgccgtcgttttgaaatgggcgcgttgctcagcgttagcctgatcctgctggcgttggcgaccatcgcctcctgcatgaccaccgacatgacgctgttgctggtgccgcgtctgctaaccggactcgcctccggcgtcattatcgtattgggggaaagctggataaccggcggcgcggcgggcagtaatcgcgctactctcaccggcatctatgcctcggcctttaccggctgccagctcgccggcccgctgcttatctccgtcggccccgcctggcaacacgcagcgctgatggccattgtcgccattaccgccgtttgcctgctaatgctgcgtcatctgccgcacggcagtcgcgaaagccttgccgagcgcgccagctggcgcagcctgggggcattcttgccagttctggcctctggggtattctgctttgccttcttcgacgccagtattctcgcgctactgccgctgtacggcatcgataaaggtttaaatgaaacgatggcggtactgctggtcaccgtcgtcctcaccggcgacgctatgttccaggcgccgctgggctgggttgccgaccgcttcggcatccgtcgcgtgcatcttatctgcgcggttgtctttagcctgtcgctactggcgctgccgtttatgctcgcctcgcgcgtacagctgatggctatctgcctgctgctcggcgccgcggcgggcgcgctttacaccctgtcgctggtgcgggcggggaaaacctttagcgggcaaaagctcatcatgattaacgccctgtttggctttttctggtccgccggtagcgtggccgggccgattgtcagcggcatgctgattggcgtctccggctatgacggcttgatcatcaccctgttcgccagcggcgtgctgttcctgctaatccagtgccttagcaagaatgaaaaaacgctgctcgccaatgagcaggaagaagacatggaagaggctaccgagaccgcgcaatagcggaggttgttgataacgggcaggcggggatccacctgcccgttttgcttttggctacagcaccttactgaggaaggcagcggtgcgcggattggtcggcgcgctaaagatctgcgccggtttgccctcttcctgaatcaccccctgatcgatgaaaatcacccggtcggccacttcgcgggcaaagcccatttcgtgggtcacgatcaccatcgtcatcccttcgctggcgagatttttcatcacttccagcacatcccctaccagttctggatccagcgctgacgtgggctcatcaaacagcatgatcgatggcttcattgccagcgcacgggcaatcgctacccgctgctgctgaccgccggagaggctggaaggccaggcgtcacgcttatcgctgaggcccaccttcgccagcaaaccttccgccaggtcgaccgcctgttggcgcggcatgttgcgcaaattcatcggcgccatcagcaggttttccagcaccgtcatatgcggaaacaggttaaagcgctggaacaccatgccaacactttcacgcatcttattgaggtcggtcgtccggtcatgggcggcaaagccgttgaccaccacttcgccttcgctcacggtttccagcgcattcatgcagcgcagaaaagtgcttttgccggagccggagggcccgataatgcacaccacttcctgcggtttaatatcgcaactgatgccgcgcagcacgtggctatcgccaaagcgcttatgtaaattattaatgtgaatcacttttgccaaacctcttttccagacggttaaccagctgcgccagcaggaaggtaatcacccaataaaccagcgagatcgtcaggtagggctcccagtaggtggcgtaagcgccggagacggttcgcgccgcgtaagccagatcggcaagcccgatcgccgaggccagcgatgagtctttaacaatagcgatagcgttgttgccaagcggcggcagaatgcggcgaaatgcctgcggcaggatcactttacgcatggttttccaccacggcatacccagcgcgcgcgaagcttccatctgccctttatcgatagactggatcccggcgcggaagatctccgacacgtaggccccggcgttaagggtaatcgccacgatacaggagaggaacgcgccgtagttagaacgcagttcgcgggcgaaatcggcactcatcactccgctggtgaccagcaggccgtcgcgcgggttaataaacagcggcaccagcgcaaagtggaccaccatgatctgcacaaacagcggcgtaccgcggaaggcgctgacgtagaagcgcaccggaaactgcaccagataacgcagaatatatttccatggcccgtgctcggccttcgccatccgccccagtccaagcgttaacccccacaacgtcccgaggatcacgcagataatggtacatttaatcgtcatcaaggcgccgtccataaacagcgggccatactcctcgatgatctcccaacggaatcccgtcatagtccttccctaaaaaatacggccatcgcctgagcgacagccgcggtcactgaaaattggtgttattgcgcaggcagcgtcggcacgttgtcatcgaaccaggttttatagattttggcgtaggtgccgtcggcaacaattttctgcaaaccggcgttgattttgcccagcagttcactgttacctttagcgacggcgatgccgaaatactggcgctcaaatttagcgtcaggcaccagcttgaactgcttttccgggtgctgcttgatgtagtatttaaccaccccaacgtcgcctaccgcagcgctgacgccgtcttcaaacagctcctgcagcatgagcggcgtgttgtcgaaacgcttaatggaagtactgtttttacccagctcctgcgaaaccacaatatcgccagtgctggagttcaccacgccgactttttcgttttttaacgccgccagcgagttcacttttgaaccttgcggcaccacaatcgactgctcggccgggaagtacggcgcggagaaatccaccatctgtttgcgtttatcggtgatggtaatacccgagatgataatgtcgcgatcgccggtacccagagtggcgaaaatgccctcccagggggtattgaccagcttcacgtcaaaaccttcggccctggcgatcgctttaatgatatcgatatcaaagccttccagctgtttttgactattttcgaattcaaagggacggtaggtgccgccggagccgacggtataggtttccgcagccgcctgtccggctgccgccagcgcggccatcatgaaacacgctttgagcaaattcttgaccatgagatatcctttttatgcatttattttgcataaaaatacacatacttagcatggcatgcaaccggaaagcatcgggatagcgaattatcttttgttcaaccgcgttgaccacctgatttgccaatggctcgatgcaattcattgattcgcttcattgatttgaccgtcttttgcggcgtagtcgaggcaacggacagcacgatcatctcaaggcaaatcagcaccgtaccgtgcagcggcactcgcccgttatcgccgccgcgcggaacatcaatcaccacctgtgccagttgactgaagcgcgaatccagcgcctgggtgagtaatatcgtcgggatccccagccgctgcgcctcgcgcaacgtggtcatgccctcccggtgcggcgatttttgccccatcataatcagcacgtcgccgcgctgcaggctaatcaactgctcagcaagactgaagccggtacggttgagggtacaggcaggtaagccaatacgattaaacagacgcgcggtgtactcggcgaggatccccgacgccccgatgccaaatatcgccacctgacgcgcattccccagcagcgccaccgcctgggctaccgccgcgcgattgtccgcacgcgatagcacctcacaggcgcgttgatgcccatcgagcacaaaatcgatgctggaattgacatcacaggagagtgcccccaccgtcgagcgcatcttttccgacgaggtcgcagacggcccgaaccagcgcgccatggtctcttttaattcgcgtagcccggcaaaacccaatgcctgaattgccctcaccacggtggcatcggaggtgtgagtagcggtggcgatctccatcgccgtgcgttccagtaccacctcgcgattatcattaatgtagtttgccacttcgcgtaaacggggcgaaagttgatgcgcgcgggcgcgaaaacgctcgccaaacagatcgactctgcccttctcttttttcactcccgctttcatttcgcccccgccggaatcggccgcccggcgatgtgcgactgcacctgagcaaccatcagcgtcaatgcggcatacgaattagaaataacctcttcgcgcggcaacaaaatatagcggccggtgcggcaggcgcgcataaagtcacaccagccgggcattaccgcctccatggcctttagctcatcctgcggcttaccgccggtgtccgaacgccaggtcgcgaagacaaaatcggcatccagctccggtagctgctcggcgctgacgtcaatccgctggccatcggggatcttgtcgatcaacggcgggaagcggaacccggcgtcacgcagaactcgccccagcgcgtgataggagtagtgtaccgtcaccttgccgttattcgcctgtatcaccgaaacgcggtactgctgcgggtcgaccgtggcctttagctgtttaatttgttcctgataacgacgttcaagcaccgccagccgcgcctggctgccggtgagctgcgccagtttgcggtaaatccgcggcgcgctgccctgcaggtgatcgatactgaccgtcggcgcgattttcgccagttgctccaccgagacatggcggctcggctcggtaataatcagatccggcttcgccgcagccacggcttcaaggtcgatatcggcggtgccaataaagcgaatctcgctattgtcgaaatcgacgccggtcaactgggcgctggaacgcaggtagtggctgccgtcagggcgcgtgcggccatggctggccaccggcggtaccccaagctcaattagcgggatggtaatatcgagatcgtgcatcgaaacgatacgctgcggatgcagcggtacggtcaccgtacgacctaaatcgtcggtgaaggtttgcgaatcggcagccgcggcagcgcccgcgcacagcaccagcagagaaacgaaccaacgcataacaatcctttttgatttacagggcgtcacggcgacgccaaagcagagcaataaaaaatgggcaccccaccagagcaataacaatccccgccgggatctgcagcggcgcaaacgccagccgccccagcgtatcggttgccagcaccagcaacgcgccaatcagcgcgctgccgcagagtagcgccacctgaccgccgcgcaggacgaaacgcgccatatgcggcgccatcagaccgacaaaacccagactgccaacgcaggaaacgctggcagaggtcagtagcacgggggcgaagaaacgcagtagcgtgagctggggcaaacgcacgccaagaccgatggcagtacgatcgcccagcagcgccacatccgccgcgcgggcggtgcagaacagaatcaatgcgccaggcagcgcccagcaaaacgccaccgccagcagcggccaggtcgccgcgtgcaggctgccggagagccagatcatcgccgtctgtacatcgcgtacgtcagcggtggtcataaaaatgccaaccgccgccgccagcgtccatgacacgccgatgccgatcagaataaagcgcggacgtgaacaatcgcgcgccagcgccagcaccaacagcgccaccagcacgccgccgagcattcccgccagcggccgccacgccagccctacggccgggaaaaacagaattagcgccagtaccacaatgcaggctccctctttgacgccaataaggccggggtccgccagaccgttacgggtaatgctctgcatcgccgcccccgccaggccaagcatggcgccgcacagcagcgccatcaaaattcgcggcaggcgaatgtcaaacaggataaagcgttgctgctcgccaatctgctccggcgccagcagcgcacgcgcccatgtcgaagacggcagcgggaagctgccgcggctgaggctgtagagccccagcgtcagcaaaatgaacaggatgaaggcggcaatttttaatgccgccggacgtaacaataggcgggttgaacccatcgccagaggccgaaatccggcgcgatgaacggcgcgtttcatttaaaaaacctcgcggcaataaagataaacagcggcgcgcccaccagcgcggtcatcgcgccggtcgcaagttcctgcggggcgacgatcgtacgggcagcgatatccgccagcaccagcaccagcgcccctaccggcgccgccagcggtaacgccagacgaatatcttgcgttatcagacggcgcaccacgtgtggcaccaccagcccgacgaaccctattggtccggcgaccgccaccgccgcgccgcacagcagcgcaatagcggccagccccagcagccgggtctgcaccagattcacccccagccccagcgccactttatcgcccagcgccagcacgttcaggcgtggcgcgaggagcagcgccagtcccatgccagaaagcgccggcaccagcgccgcctgtagagtagcccagttcaacccggccagatcgccggcaagccaggtgcgcatcgccagcagcgtttgttcgtcaagaattaatatcgccgccgtcaccgccgaagcaaacgccgagatcgccacgccgcatagcgtaatgcgcagcggcgtcgccccgccgcgcccggcagaggccagcgccgaccggcatcgggccaggcctgcgtgaacaggccgcccagcagccatagcgcggcggcaagcccgccctccgtccagagcagagcgccgagccccggtcgggcgagcgcgcggtcaggcgaaaacgttgacataaatactctccgcaaactgatgaggatcggttcccggtttgatgacctgtacccgctgcagatccacggcatactgcgtcagctctttaacaaaagcctcgcccaccgcatgatgaccgtgcccctggccgtgaagaatgccgctcacctccgcttcgttagtatttagcgcatgggcgagaaaagattgcgccacgctttccggatgcgcggcggcatagctgtgcgcttccagaatcgcctgggtaagcgcggccgccgccggtttatgatcgcgcgcaagggcaccgctgacgcccagcacgcagcagctgagattggcataatcgccggtcatattgctggcgattagctgatatttcccggtttccagcaggcgatagctaaagggctcgctgccgctaatggcggcgatttcgcgtttatccaacgccacgctgagcaggtctgccggatagactttccactgcacatcgcttatcgggtcgatgccgtagcgtttcagcaagatggcgaagaagtttttatccggcccggccatatcggtaacgccaatggtttgccctttcagactctccagcgcgccaaaaggcgagtttttggccgtcagcagattcaggcaaccgccgtgcgttccggcggtaagtttgacgtcaaagccctgctccagcgccttcagccagcgtagcgccatgcctaccccggcgtcggccttgccggtggcaatcgcttccagcaggacatccgtcgagttaccaaagttaacaaactcaacgtcgaggttatatttactaaaaatcttctgctgctcagcgacggcgaccggcgccaggcacactgcgcttttgttaatcgccaacttgattttataaggctgcgccagacgcagcgccggatgttcatcgccgctcgccatctccgccatatcgtgagcccatagcggcacagacgccccggccagcgccaggccaccggtaaactgtaagaaacgacgacgggtaaaacgtgtggtcatcatggcgccgcctccgcatgaaccggcgtgaccggcacgttaaagccgtgatcaaatgtcggcgttacatcgagctttgcgcgaatgaggccgttggcaagataaaagtccgccgtcgactgctgctgggcgaccgtcggcgcgtccagccgctgccactgcgactggcggttggcaaactgcgcgcgggcgatatccgccgggaaacgaatgatctcccccagcgttttgccatagctatcgagattggcgtaagcccaacgctcggcgccggccagtcgggtaagataatcctgaagcgccgcgcgcttttgcggatccttcagcgcattatcggtggcggccaggaaggtattacccggcagcagccctttgccgctcaccagaatctgcccttcagcggttttcaccagctgcgtggtatagggctcccaggtcgcccaggcatctaccgaaccgttaagcagcgcgacttttgcatccaccgggccaaggaatacccactgtacttccttcggcgaaacacccgcctgctccagcgctttcagcgccacaaaatggccaatcgatcctttcccggtggcaatgcgtttaccttttaaatccgccgcgctttttaacgcgctgccgggaggtaccaatacagcggtccccgccgggttgctcttatcgacggcaatcgcttttaccggcgcaccgttcgccagcgcgaacaacagcggcgcatcgccgataatccccacgtcaaccgcgccagcgttgagcgcttcagccagcggcgcggcggcaggaaactcggcccatttaatatcgtaagcgaggttttgcaaggcgttagcggcctccagttgtgaccgcatgccgcctttttgatcggcaattcttagtgtgattctttcctgagctgcaacatagctgctcagcgtcaatagcattagcgccccggctatgcgggtaaaatggggtatgcgcatctgaattatccttgttgttgaaaagcttgtttacccgccgcctgccacgcgctgtcgttctgcggcgtatgtacccgcccgcacaggacgttgcgatagtgacgttccagaggatgttgccggcttaaaccatgatttccggtgagttcaagcgccaggttgaccgccagaatggcgttgtcggtgacagtgactttcgccagattggcctcaataacggaaaagccgagcttcgcggcattctccagcagcgcgcggttaaccagcagcagcccttcgatctgccccactttttcctgtacccgcggcaggctggaaagcgcttgcccaagattgccggggacccgcgcgccgagccacgcgacaagccagtcgcgcgccgcacgggccacgctatcgtaaatcgccgccagtagcgccgtatgacggttggcaaacagacgaaactgttcggcgtccggcgcgggcgactcgtcggtgggccaaacgtctaccgcgtgcccggcggacacctgcacgtttttcaacaccacctcgtgactgccggtggcccgcatgccgaggtgatcccagcttttcaccacgctgatgccctcgctgtcggcaggaaccagccagctaccgaccagcggcgggttgtcgtcgctgcgcgcccacagcgccagccagctcaatccttcgataccggtggtataaattttgtggccgttaatcagccagccccggctgttacggctggctatcgtttgcggcaggccgccgcgcgccggagagcccagatccggttcgacgcgcaggctattgatcaacccgccgtttgtgagcgcatcatcaaatacgcgctggcgtagcggctctgcccagtgcgtattttccgccagccgcagatgatgcagatactgcatgcagacaatcagcgcggttgccggttcgccccaggcgatggcggcgatagcctgttgcagctcggctaaactggcaccaggtccgccgtactgctgcggtacggcaaggcttaaaaatccgcgtcggcgcagaacgtcaatattgcgacggggaaaatcgccgctggcatcaaggctggccgcctcttccgccatcagttggcggatctcggcaagctgccgtggccaatctgcgattgggcgatgactcacgatgcacgctccgccacggcgcgcagcgcggctttttcgcgggtaatcggcagcagcgctttgccatactcctgcgcatcgttcagcggatcgaatccgcggatcaggaagttacgcacgccgaggtcgtagtagtcgagcagcgcatcggcaacctgctccggcgtaccgaccagcgcggtagagttgtggccgccgcccaccagctgcgcgatgccggtccacaggcgtttatccactaccttgccctgcgccgccgtagcccgcagacgctgcgcgccaacgctatcgggcttggctttaaagcccccttcactctgcgccgcccgctcggtggcgacatgcaaaatatgctcggctttctcccaggcttccgcttcgctatcggcgataatcggccggaacgatacgctgaaaccgatctcgcgctgatgttttgccgcttcggcacgtacccgctggatagtttccgcagtctgcgccagcgactccccccatagcgcgaagacgttagcgtgtttaccggcaaccgtaattgccgcctccgacgagccaccgaaatagaggggaatatgcggtttctgcagcgtgcgaatcgccgaccaggcctgttgcgcctgataaaaatcattgtcgatgtccaccggctgttcggcggtccagactttgcggatggtatcgaggaaggcgtcggtgcgcgcatagcgctggtcgtggtcgagataatcgccgtcacggcgctgctcggcatcattgccaccgctgataatatgtaccgccagccggccgccaagcagatgttcaagagtggcaaatttacgcgcggcgagagttggcgagacaaaaccggggcggtgcgccagcaggaaagctatcttttgcgtcgacaaccccgccagcgcggtcaccaaaaagccgtcgggttgatcggaccaatgccccaccagcagacggtcaaaccccgcggcttcatgtgtttgcgcgaagcgcacaatataatcacggtcaaaaatcggccctaccggggcgatggtttctgacgacaggcggtggccgatcatgccgagaaactgaatgctcatacagaactcctggtagcaaggtaatgaatgggccgcggcggcggcacgttttcattaccctatacacaggcacttaatgatcgaaatgcatttttattataacttaatatgcagaataagcatttaaaaatttatagatatctttcaatcagatgcgttaagttgctgcacaatttttccggcaaaaaaagtcagcggctggctcagattagccagattctgcgcgtttaccagccacagatgcacttccggctgaaaatccgcgagcgcaagcgtggccacttcatcgcgccacgggctggcggccagcgcggcgcgaggcaccagtccaagccccagtccctgcgccaccaggctgatttgcagctgggcgccagcggtctcgacgttcagcgcaagccgcagcccctgcgattgcagttcgcggattagcccggcccgcaggccgcagccgtcgggattcagtacccagcctcgctgcgcacagtcgcgcagcgccccggcgtgcagtcgccagcttttcgccgcgatgaccacgatatccagcggacacagcagccttccgctgtagccgtcagcaaagcgctgctgttgtggtcccatcgccagcacgccatccagttcgacgctctccagccgtttttgcagcagcccgctccagccgcaggtcacctgcggctccagggccgggaactgctggcgtagcgcgctcagcgccggctggagggcgatttccgccacgctctgcggcacgccgagacgcagaacgccctgcggctccgcctccggatcgagcagcccgtacagctttttggtttcccgcttgatgctcaggcactgctcatacacccgatgtccggcggcggtgagcgtcaggggccgggtctggcgctccagcagcgtcacattgagggtttgctccagacgctggagccgacgggtaatcgccgattgggtaatgccaaggtattccgccgcctgattcagagaggaaaactgcacggtagccagcagagcatcaatgtcatcgatacgcatacaatccttaatgtgatttttgcatattaatatatgcgtaaattgcattttaattatattaacgcctttgctagcgtaatgaccagtcccgacaacaggaaatcaccatgaccgcaccgcgagtggaaaaattacgccagttcattcaagaccttgatgccctgcatcgccagtttaccgatgaggccaccctactcgacgccgtcgccgtgcgcctggcttcgctggtgcaaaaagacgactggttgccggaagagtacaccctgccgcatccccaccactatcagcagtatttgctgcatgccgattccggccaacgtttttcgattgtcagcttcgtctgggggccggggcaatcgacgccgattcatgaccatcgggtatggggagccatcggtatgttgcgcggcgcggaggagaaccagcgctaccgactcgacgaacgcggtttgccgatcgccactggccctgctgaacggctttctcccggcaaggtagaaaaagtctcatcccgcgatggcgatattcatcgggtgagtaacgcgctcgctgaccacgtctcaatcagtattcacgtctacggcgctaacatcggcggcgtcaggcgtgcggtttataccgcggatgggatcgccaaacctttcgtctccggttactccaaccgtcacttgcccaatatctgggatctctcaaaggataatgaatatgcctgactacaattatcgccagccagccgaggtacgccaggcgctaatcgatggcgcagaagtggcgctcatcgatgttcgcgaagaggccgtatttgccactcaccatccgctgtttgccgctaatttgccgctcagcaagctggagctggagatttttcgccgcgtgccgcgcctgacgacgccgattaccctctacgataacggcgaaggtctcgcggagcaggcccttgaacggctgcaacgctggggctatcaggatgtcgcgctactggcaggcggcctgacgggctggcagcgcagtggcggcgagctctttcaggacgttaactcaccgagcaaagcgttcggcgagctggtagagagcgagcgccagacgccctcgttgaacgccgaggaagtgaaggcgctgatcgagggtccccagccggtcgtggtggtcgacgcgcggcgtttcgatgagtatcaaacgatgaatattcccggcagcatcagcgtgcccggcggggagctggcgttacgcatcgaaggcctgctgccgtcggcgcaaacgacagtgatcgttaactgcgccggtcgtacccgcagcattgtcggtacccaatcgctgcgcaatgccggcttagctaatccggtatacgcactgcgcaacggtaccatcggctggaccttagccggactggaactcgagcacggccaacagcgtcgctacgacgccgatttccgcgcctcagcgcaacgcgtagctgcggtgacgcagttggccgagcgcgctggcgtggccttcattgatgccccgactttagcccgctggcaacagcagccgagccgcaccacctatctgtttgatgttcgcagccccgaggagtatgccgcaggccatctgccgcacagcgtgaatgcccccggcggccagctggtgcaggaaaccgatcattatgccagcgtacgcggagcgcggattgtgctggtctccgacgatgagatacgcgcgccaatcgcggcgtcctggctggcgcaaatgggctgggaagtggcggtattacgcgatgtccgcgtggagcaattgagcgaacgcggcgttccgcccgccagcgtaccgccggcgccgcaggctgaggagataaccccagcgcagttagcggaacaattgcgcgaacccggcaccgtggtactggatttcaccaccagcgctaactatgtcgcacggcatatccccggtgcctggtggctggcgcgttcacagctgcgtcaggcgcttgagctcatcccttccgcaaaacgttacgttgtcacctgcggcagcagtctgctggcccgctatgccgtacctgaagtcgcggcattgaccggtaagccggtacaactattaagcggcgggacgctggcgtggattgatgccgggctggcgctggaacagggcgagacgcatctggcaacgccgcgcggcgatcgctatcgacggccttatgaaggaaccgataactccgctgaggcaatgcaggcttatctcgactgggagtatggcctggtggaacaattagcgcgcgatggtacccacggctttaaagtgttgtaagtcacaaacccggtggcgacacggccaccgggaatagcttacctttattggaaattaaatttccggggtggttttaaagccaaccagcatcaggatcggctgcttctgcgccgctgcggcgtcaaactgatagtggttgccctgacggtcgccgccgatgtaccaggagatctcggttttcccttccgccagcgccttacgcaccgctttatcgatatccaccatccgatactcacgagatgaattgagatacagttgagcatcagagttgtagctgcaggtcgggcgatgcttccaggtcacgctcgccgcgctccagtcattactggccgggtagaagaagatctggtccgcgccgttagtttccactttgccgccgtacagacgcaggcgatatttaaacagcgacgcatcctgatctttcggcagcgccgggattttaaacttcaccagggtcagggtttccgggttgctggtacggccaccgttcttccagttatcggaaatctgcagcgctccaggcgccccgaagttaacattcggctgcgcgctctcgaccaccgcgttttcttccgccagcgagaagctataaggcacgttggtcccgcaatccatgccttcattcatacagtgttcggtcatgaagtgcgcgccctcgaccgtccagccgttcatgaaatcagcatgggcagtatagatgctgccccacttctcttcacgtttatcgctcttcataaccgggtccatcgacagctcaattttcgccgtgtccagtgatttaatctgcggcagcacgtaggcgatattcatattaaccgtcgggatttttaccggatagtcggccgggcaggcaccgttgacatcataggcggcgttgctgtgaccgtggctcggcttcaggttgacgccatcccagcagttggggaactgaataccgatattaaactgcaccgcgtcgcccgctttacgtaggccgcaaacctcacctgccttgttgctatagcctttaccgttagcgcacaggaaggttatccgtgagctcggcgcagtgccgtggtggtcgccagccagcagctctaaccccgacgggaaaggatgcagcggatactgttcgactttggtcgcctggtaataggttttctgataagccggagtgacaatttgtccatccggcaacttcattgacggcgcccaataggcagaactatcggccttgttatcacaggtggtttccggctgcgcgcgcagggtttgataagttgagaccgcgtcggtgtgggtattgccgaagaaatcatgccacatcgcctggtttggcataccgaacatcataatcgcgtcgtcgccaagagtgtggctgtaaccgcataccgcctgggcttgcggtcctgcatgggcggaaaaagcgctggcggccagcagcggggtcagggccagtacaactgagttagctttcattttacgatcctccttgtttgaaggaccgtagagatagcaagcgtgcgccaatgttacacatcagcaaacatcattttatctcattcgcgcataatccatgaatactggaaggttttcgccgccggaaaatgggtgcgccgacggtacgagccgagcgcctgcggcgtgcagtaggtacagcttcccagccattcggtattttccgccgccaccccggcctgttgcagcacccgctgcgccagcgcgcggagatcgaaccacagattatcgttcccggtcgcctgcgcttgcccggtttctggcggggcgaggcgctgatgaaacagctcgtcattgtaccgttttgccagcttgcccgccggcatggtcaacagcaactgataaaactcggccgaaacctcatagcagcaggcgtgaatatgcggcccgcagaccaccacaacgtcttctattgccacatgatgctggcgaaatagcgccaggctgttttcgataatgccgctggccgctcctcgccagccggcatgcacgctgcaaacatagcgcccatcccgcgaggccattaacagcggtaaacagtcggcggtgacgacgccgaccttttgcccacgcagagccgtaaataccgcatcggcatgcggccgctctgcctgcggcccctgataatgatgaacaacattgccgtgcaccagcttaaccggcgccatttcgctgtacggaaaagcggcggtttcgtgcacatcgagaaaagcgtaacgaataccggggatatcacttaataagcgggatggataagacataacggcgcatgaatggattggtggtggatttaccgtaggtcaaagccgctcgatacgcaagatgtggatgctttgttcctggtatcgctatataatttaatatatatcgcttattcttatccaaccgggttaatccatgtcaccacaccgtttacttttggcgctaacgttgttcagcgccagcctgttcaccagccaggcctttgccgaccgcaccgtcaccgaccaactgggccgccaggttacgctgccggaccacatcacccgcgcggtcgtcctgcagcaccagacgctaaatctcctggtccagttgaatgccggcgacgatatcgtcggcgtgttaagcagctggaaaaaacagctcgggccgcagtttgtccgctttatgcccgctattgaaaatctgccgacgccgggcgatttaactcaggtcaatatcgaaagcctgctggcgctgcatccgcaggtggtgttcgtcgccaattacgcgccgcaggcgatgatccagcagatccaaaacgccggggttccggtcgtcgcgatatccctgcgtcaggacgcggcgggcgagaaaaacaaaatgaacccgacgatggccaatgaagagcaggcctataacgacgggcttaaacaggggatccgcctgattggcgaagtcgtcgaacgccaaaaccaggccgaagcgctgattgattacacctttgcggcgcgggcagaagctaacgctccggtcgccggtatccctgacagccagcgggtgcgcgtgtacatggccaatccagatctcaacacttacggctccggcaaatataccggtctgatgatgaagcatgccggggcgctgaacgttgcggccgcgacggttaagggtgcccgtcaggtctcgctggaacaggttctgcagtggaaccctgaggtgatcttcgtccaggaccgctatccgcaggtggtcaaacagattgaaaacgacccgcaatggcaagcgatagacgcggtgaaaaaccaccgggtatggctgatgccggaatacgccaaggcctggggatacccaatgccggaagcgctggcgataggcgaactgtggatggcgaaaaagctctatccttcccgctaccggaacgtcgatgtcgatgcgaaagcgcaggattactatcaacgcttctaccgcgtgaaatggacgccgaatgcgcagtaaccttcactggcccctgctgcacggagggctaacggcggcgacgttgtttatcgctatcgcttcgctatgcctggggcagtaccacctcagcctgaatgaggtctttcatgagcttacgcatggcgcgcccgatagcggcatcgccgggcagatagtctggtcagtcagacttcccagggtagcgatggcgctgctggccggcggctcgctggggctatgcggcgcgactttacaaggcgtattccacaacccgctggtcgacccgcatatcatcggcgtgacctccggctccgccttcggcggcacgctggcgatcctgctgggttttgacatcatatcgatgatggggtgtaccttcttcttcggcctagccgcgctggcgctggtttatctgattgccaggctgcaagggcgtgaaaacacgctagcgctgatcctttccggcattattctcagcggtttctttgccgcgctggtcagcctgatgcagtaccttgccgacacggaagaaaccctgccgaatatcgttttctggctgctcggcagctttgccaccgctaactggcataaagtgctgtccatggcgctgccggtcgccgtcgccgccgttatcctgctaaagctgcgctggcgtatcaacctgctggcgctggagaataaagatgcgcgcggtcttggcgtttcggtgaccacattgcgccgcggagtgttggtttgctgcgcggtgctggtcgccgcccaggtcgcggtcagcggcagcatcgcctgggttgggctggtgattccgcatctggcgcgactgctggttggtgccgatcaccgccgactgctgccaacggcattctggctcggcggcgcgtttatggtggtggtggacgacctggcgcgcaccttaacccaggcggagattccgattggcattattaccgccctgctcggcgcgccgctgtttacccttttactcattcggtcccaacgccgcggagtggcccaatgaacatttcattatcactggacgccctgcgctatggtcatcgtcagccgctcttctccccgctgtcaatgcagtgccgtcacgggcaaatctgggcgatactgggcgccaatggtcgcggcaaaagcacgctactggataccctgaccggcgttctgccgccgctcgccggaaagtttagcgtagaaggcggcatcgccatcgtgccgcagtcgtttcgtccggcattcggctggcaggtacgcgatgtagtactgatggggcgcgcccgccacgtcgatctgttcgcgcagccggggccggaagatgaacgggaggttcaacaggcgctggcgcagttggggatcgccgcgctggccaatcggctttttcgcgccctgtccggcggacagcagcagttggtgctcattgcccgagcgctggtcagtgagagtcagaatatcctgttagacgaaccctgctcagcgctggatctggccaatcaacagattgtgttacagctaattagcgaccttgctcatcggcagaagcgcaccgtgatgttcaccacccatgatccgactcacgccctgcaggtcgccagccataccctgctgctgttacccggtggcgaatggctggcgggagagtcgttcgcggtgctcagcgagacaaacctccggcgcgcctacgggctgccggtccacaaaatcgatcatcccggtagcgcggtgccgttactggcgccgcagtttacgatccatcgttaacggccaaaaaacctgccgcgcgcagaaaattctgcccttcctcagcggtgataaagcgccgtaactgccgcgcggcggcgctctcctcaatttctgccagctgatattcgcagcaaatattccacggctcgggaatgagtaacgtgcgaaactgcgcgctctccgtcatctgaaccgcatagtgggcgtagccgataaacagatcggcaaagtcttcgccaattagccatgcccctgcggtagcgcccgacggtacagtgagcgacgcccgaccgccgaccagctgttgcgcccgggccatcaacgtccgtccgaggcccggatagctggcctcaagacgggcaaaaagctgccaggtgtaatcaccggaaggatcgcagcccggcgtcgaggtcgccagccgcagccgagaatcgtgcagtaacgccagccagtcagcgcgatcggtatcaggcgtgcggcgcacggtcagcatcagtcggttagcggcaaacgaacagcattttatcgcaagcccggcttgcagcagcgcctgagggtgttcggtattcgcacaggcgaacagcgagcagcgttcgccgccttcaatgcgttcgcgcagcagaccggccgggccaaactgcgcctcgacctgaatgccgctaagctgctgaaatcgcgccagcagcgggaggaaagcgcttttcaggcttcccgccgccagcagagtcaatgaaggggccatcacacgaaccgctataaagatgaaaatatagcgccaggataacgccttttttgttgattcagtagcgaatttccgcccgttcgcgcagctgttccggcgtcgccaccggcagctggaagaactcgagataggccgggatcatttcgaacagcatatcggtaccgcgctgaatcggacaccccaacgcctgcgccgcccgcagtagcggagtatattcaacgctcatcaccacctcgccgacccaggtgcgcggcgacaggcgagaaacgtccagcggtagcggatcatccgctttcatgcctagcggcgtggcgttgaccaccagatcctgcgcggcgggatcgcgctgcatcagaacgatctccagacgcggatagtgctgatgcagccgctgcgccagcgcctcggcggcggataaagaggtatcgaacagcgtcaaggtactaacccctgcggccgccagcgatgcggcaatcgccgagccgacgccgccgcaaccgaacacctgcgcccgcgccccttgtggttgaaagcccttgcgcttaatccccagcacaaagccttcgccatcgaacatatcgccgcgcaggctgccgtcggcttcgcggcggatggcattgcaggcgccggcgattgccgccgtcgggctcagttggtctaccagcccgcaggtcgccattttatgcggcatggtgaccagcgcgccgacgatgttagtcatggaaaacagcgctggcaccagcgccgcgtaatcctccggcttcacccccatcggcaccactttgacgtccgcctcgcaatgggccagccatgggttataaatcatcggcgctttaaaactggcggtcggataaccaagatgcgctatcagccgcgtatgaccactaatgatcatgccctactcctgttgttactgcgaaagttcgatgcgtttgacatcgccaaggataaacagataggccactacgccaagcagcgccgcgccgccgatatagaccagcgcgtagaaaaaactaccggaagcggcaacgataaaaccgataatcagcggcgtgaggatccccgccagattggtgcagaaattaaagatgccggcggttatcccgcccatcccctgcggcgcgatatcggaaattaatgtccagcctaggccgaccattccctggccaaagaaggcaaatgacatcatcaggatcaccgccaggtcgctcggcagccagttggcggaaataatgctgctggccatcatcagcccgacgacgataggcagcttacgcgccagattggccgaaccggtggctttcagcagcttgtcggagagccagccgccaaacagcacgccacccgccgcggcgagaaacggcaagatggcgaagaagcctactttcaaccacgccatgtggcgctcggtcgccaggtacgttggaaaccaggtcagaaagaagaccagcacggtattaccggcgaattgaccgacgctggcgccaatcacctgtcgttttgccaacagctggcgcaccagcggccagctaaaagcgttttgctgctgctgcgcgctagccagtccgccgccacgtagaatatgttcgcgttcactgtcgctcaggcggctgtcctgatggggttcgcggtagcaacgccaccagaccagcgcgaacaggatgccaacaaccccgacgctgataaacagcgcacgccagccgaagctgcccataatccagaacagcagcggcgagaaacaggccagcccgagatattcaccgacggtgtagaccgccgtggccttcgcgcgctcctgctgtggaaaccaggtactcactaccctgctgttgaccggaaaacagggcgcttcactgacgccaagcccgaagcgacacagcaacagcgttttcaagccaatcgccataccgtgaaataaggtgaacagcgaccacagcgccaatgagaggaaataggtcaccttattgccgaaacgatcgaggaaaataccgccggggatttgcgccagcgcgtaagtccaggcaaaggccgaaaagacaattcccatgatggcggcatcaatgccgagctcggcggtcagtttcggcgcggcaataccgagcaccgtgcggtcgagatagttaatcatcgtgccgacggccagcagcgccaggatcccgatacgccgccgggagcgaggcgcggtggtcgcggtatccgccgccgtcgcctggttatggctataagagttcatagtcgtttcctgtcttgagtacagatgaatgttgttattgtgtttgcgatgttgtgttgtgaaccatttgctacgtttaactgtactgcatcgccgaaaggcggacggcggcattcaccgcgccgtactgggcgtaaccgccgcgccgttcggtcaattcgaagaagaaacgccccgccgcgaatggacgggtataaaggtggaggaattcgccgccgcgggtatcacggtcgtagagaatttgcaggcgttgcagcgtctctacctgcgactctccaccgaagcgcgccagcagatcctcatagtaattcgccgggatcggtagcgcgttcagcgcggcctgcggcagattttcgagcgttgcgggtaaatcgcggcaggcaaaagcggcgtgctgtagcccggcgccctgataacaggcgaccgaacgcgctatctgcgtggctcgactttgcgaaatattcagcgccagacggatatcgccctgcgggctatgaaccgccaggctgcgcaccaggccgtaggggtcgggcaacgtctgttcgtgttcgagactgaagccgaaaaccgtacggaaaaagataatccagttgtcgcggctatcggcctccatgcctaacgccagatggtcaataccgcagtagtcgtcgcgcggcgcgtctgcctgcaaatgaaaatcgcgggcgtagatgtcgtcaccggtttcaaccaggtagatcaggctgccatccggggcgcaaaccgccgggatcgaactctcattaggaccggcatccccctgccaggtggcataaccgtaggcgcgggcgcgctccacaaccggtgcgctgtggctcacccgcagcgccattgcgcacaacgagatgccgtggcgctgatgaaaatggtcggcccagctgtgcggctgcgcgttaacaatcacccgcgcctcgccattacgccagagcgcaacctgcttggaacgatgcttgccctgaagcttaaaacccaactgcgccaggcgctggccaagcgcgacagactccgccggactggcggcaaattcaataaactccaggccgtcatagtgcggtagcgcaggtggcgaaaataacgccgcatcgctatccgcaagctgccgacgggtctgctcttcgagccacagcaacgaacgatagccatctttcgccgtggcacccgtgggcgaggcgcgaaagccgtcattgaaaatctccagcgaccaaggtccgcgatagccgcagcgggtcagttcacaggcgaaatccaccagcggcagttgtccctggccagggaagcagcggaaatgacggctccattcgaggacatccatcttcatcaacggcgcgtcggccagctgtaggaaggtgattttctcaaccggcacctcggcaaggccttgtagatcatcaccgagcgacagaatatggaaactatcaagaacgatgcccatcgccgggctgttaacccgctgcacccgttcccatgcctgacgccagcggttaacgtgagtaccccacgccagcgcttcgtagccaatgacaaccccctcctgctcggcgagatcggccagcgcgcgcaggtcggcgacctgcagttcgatatcggccgaacagtccggctggacgttgctacagagcagcatggtatcgcaacccagttcatgtatcagggcgaatttccgcttcgcccgctgcaggttagcggcaaactgcgcgcggctggcgccctcgaaatcgcgaaagggttgaaaaagggtgatttttagccctaattcagcgacaaggttgcgaatatcgcgcggcgtgcccgtataatagagcagatcgttttcaaagatttcaacgccctgataaccggccgcggcgatagcgtgcagcttttcgggtaaagttccggatatcgagacggtagcgatggaacgcaacataagagtcctcgggtcatcattcgacatgagcactgactatgtatcatttggttcacaggcgccagatttggttgctaaattgtgatcattatgtgtattttttgtctccatagaaaaaggagtcgttatgtccctcgttgctcatgatgaagcacaatccctgaaagagcgcatctttgccgccgccatcaccgtgtttgccgaatatggcctccccggcgcgcgtatggagcagatcgccatcgaggcgcaaaccaccaagcgcatggtggtctactacttcaagagcaaagagcagctgtaccaggcggtactgcaacatgtgtatgcgcggatccgtgaaacggaacaacagctggggctggagcacctgccgccggtcgaggcgctggtgcaattggtgaaatggagcgtgcgctatcacgccactcacgccgactacatgcgagttatctgtatggaaaacatgcagcgcggcaagtggttgaagggttccggggagctgaaaccgctgaaccgtaccgcgctgtcgattatcgaagatattctgcaacgcggccagcaacaggggattttccaggccggtctgcaggcgcgcgacgtgcatcggctgatcagtagttttagcttctatcaggtatcgaatttttatacttttagcagcctgtatctcgacgatccgctgcctgaaatcgacgacgaagcaatggtttcacaccactgcgagattgcggtaaaagcggtgattcggttcgttatctcttaagcattacttatgtcggggcgcggggtttagtgccccgacaacgcgtgaatcaccctttccatcgcctcgcgggtgagcgctgaacgttcaattttgctatttgccagcgcggtgcgtacgacaccggcaataacaatatgtttcggctcctgaccaagatcgcgcatttccaataccaccttacccactacgcggcacatttcctgatagagttcgtcgtctttcgctttatttcccattattaagactcgtaaattatcattatcaatcaattcattattgatacgattttataataaagcaaactgcgctatttttttccactcaatgaagcgttttactgcctttaataggtttgtaaatatcataaaacgccgtttaatctgatccgctgcggcaaaagtgtgttgcagcttcgcgagcgaatcgtgtgaattttgttacattaatcacactaaaaatgaaacgccgtttttattttcctttttcgtttcggcagcgtataatgcgcctcgattctttcttgaatggtttcagcgcattggactgcacacaaaaacgtacaaaacattgccatttttcatgggctgaaccgccagcacacattcttctgcacgctcttttgttgtcacctatccttagagcgtggcattgcaactttcgtaacacaggtttgactccgcggcagtgcgcccccggagcgagatttccatatccttcacaacttaaagactaagactgtcatgaaaaagaccaaaattgtttgcaccatcggtccgaaaaccgaatccgaagagatgttgaccaaaatgctggacgcgggcatgaacgtcatgcgtctgaacttctctcacggcgactatgcgaaacacggtcagcgcatccagaacttgcgcaatgtgatgaacaaaaccggtaagaaagccgcaatcctgctggacaccaaagggccggaaatccgcaccatcaagctggaaggcggtaacgacgtctccctgaaagcgggccagacctttacctttaccactgacaagtccgtggtcggcaacaatgaaatcgttgcggtgacctacgaaggcttcaccaccgacctgagcgtcggcaacaccgtactggtcgacgatggtctgatcggcatggaagtgaccgcgatcgaaggtaacaaagttatctgtaaagtgctgaacaacggcgacctcggcgagaacaaaggcgttaacctgccgggcgtttctatcgctctgccggcgctggctgaaaaagacaagcaggacctgatcttcggttgtgagcaaggcgttgatttcgtagccgcttcctttatccgtaagcgttctgacgtggttgaaatccgcgagcacctgaaggcgcacggcggcgaaaacatccagatcatctctaaaattgaaaaccaggaaggcctgaacaacttcgacgaaatcctcgaagcatccgacggcatcatggttgctcgtggtgatatgggcgttgaaatcccggtagaagaagttatcttcgcgcagaagatgatcatcgaaaaatgtatccgcgcgcgcaaagtcgttatcaccgcgacccagatgctggattccatgatcaaaaacccgcgcccgacccgcgctgaagcaggcgacgtcgctaacgccatcctcgacggcaccgacgccgtaatgctgtccggcgaatccgcgaaaggtaaatacccgctggaagccgttaccattatggcgaccatctgcgagcgtaccgaccgcgtgatgaccagccgtctggattacaacaacgacaaccgtaaactgcgcatcaccgaagcggtttgccgcggcgcagttgaaaccgctgagaaactggaagcgccgctgatcgtcgttgccacccagggcggtaaatccgcacgcgccgtgcgtaaatacttcccggacgccactatccttgcgttgaccaccaacgaaaccaccgcccgtcagttagtcctgagcaaaggcgtagtaccgcagctggtgaaagagatcgcctctactgatgatttctaccacctgggtaaagagctggcgctgcagagcggtctggcgcgtaaaggcgacgtggttgtgatggtttccggcgcgctggttccaagcggcaccactaacaccgcctccgtgcacgtgctgtaataatttacaggttattttatctttttttaaagcgctccagtcggggcgcttttttttattcattcactagctgttcttaataaaaatgcaaatcggattttactatttaataagagattatctaagatgaatccgatggaagccttctgttttcacagcgctttttaaactagatctacgaattcgatgcttctttgagcgaacgatcaaaaataagtgcattcgggtaaaaaaaatattctcatcccaaaaaagtttgtgtaatacttgtaacgctacatggagattaactcaatctagagggtattaataatgaatcgtactaaactggtactgggcgcggtaatcctgggttctactctgctggctggttgctccagcaatgctaaaatcgatcagctgtcttctgacgttcagactctgaacgctaaagttgaccagctgagcaacgacgtgaacgcaatgcgttctgacgttcaggctgctaaagacgacgcagctcgcgctaaccagcgtctggacaaccaggctcactcttaccgtaagtaagagttctggtaataaaaatggcgcacattgtgcgccattttttttgcctgttgttttaccctactgcgtcagtttagtgtcattctgctggctattctgcgctgacatctcggtcgtcgcgctgcccgccccttcagaaaccaccaccggatagcccgctcttcgcgacagcgcttttttcagttgcaggtcatccaccgctttatcgtcagaaaaggcgtgaaacgcggcaggaagcgtgtaagagattgtccgggtattttccccttcagtttgcgaaagcggcctgtggacctctacatagcgtttaccatcgggttctaccgcgaacttcactggctgattgataatccgtaccggcgtgccggcgcgcacctggctgaacagcgccttgatgtcgtcagcgttcattcgcatacagccggaactcacccgaagccccacgctatcaggcgcattagtgccgtggatcagatactcgccgttaccgtaggccagtcgcagcgcgtagcggcctaatgggttattgggcccggcggggatcactggcggcagcttaatgcccttctccagcgagcgcgcgcgaataccggcagtcggcgtccaggtcgggttagggattttctgcccgacacgggtggtcatctccggcgtttccagccccaactggccaatgccgagcggataaacctgcacctgattttgccccggcgggaaatagtacagccgcagctcggccaggttgacgacaatgccttcacgcgggacatccggcagcagcatctgcgatgggattaagacccgtgtgcccggcttcggctgcaccggcgcaatcgtatcgttggcttcaagaatcagcatcgccgccgtgtcgaaatggcgggcgatagcctgcaggttgcgatccccttcctgtaccgtccagtattggttttggccaatcaaacggctgttggctgggggaagcggataatcaacagcccaggcgccgtgctgcgcgctcagagctgcgagaagggtcattgcgatgagagacgcgcgtttcatactgagattccttctttcgctgataaaacgccaggatctgcgcggcgacgaaagcgttcgccttcgtcgcacgtaacagaatgaaatctacctgtttattctagctaagatttgcggctttcgcgcgaattgcgcggatcatcgcttcaaggccctgcgagcgggagggggtaagatgttgggtcaacgccattttttcaaaccacgggcgtacatcgaattcgctaatatcctgcgcggtcatgcgatcataaaggatgaatactaccgcaatcagccctttgacgatggccgcatcgctatcgccgcgtagggtaatcacgccggatggcccctgctccatcacgatccacacctggctttggcagccctgaataatattctgcgcgatgtgttcttccgcgctgagcggcgccaggcgctggccgagttcaatgatgtagagatacttctcttcccagttagcgcagcgagaaaagttgcgcagcaatttgtctttgtctggtaatgccgccatagtcgcgtcctttaacccagtaatttgtggatccgctgcagcccggccaccagccgatccacctcttccatcgtattgtacatcgccagcgacgcccggcacatcgccggaacctgatagaacgccatcagcggcatcgcgcaatggtgtccggtacgcaccgcgataccgtagttatcgagaaaactgccgacatcgtaggcatgatgtttcccgaggttaaaagcgatgacgcccaaacgatgttgcgggccgtaaagcgtcaaatccggcacctttttcagctcctgcaaggcatagcgcatcagcgtctgctcatattcgccgatctgctcaagcccaatctcgctgacgtagtccaacgcggcgccgaggccaataattccaccggtattcggcgtgccagcttcaaagcgccacggcgctttcgcccaggtggtgccctccctcaggctgacggtggcaatcatcgacccaccgccttcccacggcggcatctcctgtaacaacgattctttggcgtacagcacgccgataccggtcggcccgtacagcttatgcgccgagaagacgtaaaaatcgcaatccagcgcctgcacatccaccgggtgatgcatcaccgcctgcgcgccatccaccagcaccttcgcgccatgctgatgcgccagcgggatcagcgccgatagcgggttttctgtccccagtacgttcgacacctgggttatcgccagcagccgggtgcggtggtcaaatagaccgggaataacatcgagttgtaaagtaccgtcctggttgagcgggatcactcttagctcggcgccgacgcgggcacagagcatctgccacggcacgatattggcgtggtgttccatttcgctgacgataatattatcgccggccccgacgttagccccgccccagctattggctaccagattgatgccttcggtggtaccccgtacgaacaccagctcttccggcgaacgggcattaaggaaaacggccgcctgctggcgtacctgctccatccgcgccgtcgcttcggcgctcagggtatggataccacgatggacggcagcgtaaccatggcgataaaactcggcttcggcgttaatcaccgcttccggtttctgcgcgctggcggcgctatcgagataaaccaatggttggccgttaacctcgcggctcaacaccgggaaatcggcgcgcaggcgttctactgaaaatgtcatgcatcccctcccggcaggcgcttgccaatgcgcgccaacacctgttgtttcagcgcgtcatcgctaatggcttcagtaagttcggcggcgaaggcgtaaaggatcatctgctgcgccgcctgttgttcgatgccgcgcgagcgcagatagaacagctgttcgtcatcaatacgaccgacggtggcgccgtggctgcatttcacgtcgtcagcgtaaatttccagctgcggtttggtatcgacttccgccagccttcccaacaacagattgttattggtcatctgaccatcggttttcagcgcgtgtttcgcgacgttaatcaggccattaaataccgcccgccccttatcgctgacgatggttttgtgtagttgacggctgttgcagtagccaacgcggtgatcgagccaggtacggctgtcgcagacctcgtttttcaccggcatcgccagcgagttaatgcgcagattgctgttttcaccggccagacgggtactggtatggtgtcgtaacaccgcgccgcccagcaggaagctgctgctgaatgccgaagcatcgcggccaagcagcagatcgttatgggcgaagtggtagctttgcccattttcaaacgccagcttgatatgctgcagatgggcgttgtcggcgacagacatcgtcaggcgtccgccggtgaaatgccgctgctcatcaaggctaatatagtgttcgatgatggtcgcctgcgccccgctctccagcgccagatgatggcgatagtgagcggtattaagctcgtcgcctgccagtccgctggtaatatgcatcagcagcagcggtttctccgggcgctgattgcgcttcacatcgatgcgggtcaccgtctgcgccagactttcggtgagatgcagaaacacttccggctgtaccgcgtccggcagatgctggcgctggttatcaacgctgacgtcaaaaccgctagcggtgagatcgtcgctgagcgccgggctgaagcggccatcaataaacaccatccgccaggcgtcgaggttgagcgccagcgcgtcgcgctgcgccacgctgagtgtagccggagtcgcaacaaacgtgccgcttagcagcgcgtccagcggtgtgtatttccagttttcatgtttgcgcgtcggcaaccccaggcgcaacagctgttgcaaatgctgattggcctgcggcgtgcgttcttcgccctgtgcttcaaacagatgatgccactgctgcagcgcgttactgctgttcggtaagccagccatagccctgctcctccagttgtttaaccagagtgaaatcgcccgacttgacgattcgcccctgatacagcacgtggacataatccggtttgatgtaatcaaggatacgctgatagtgggtgacgataataaaggcgcgtttgccgtcacgcagtgagttaaccccctccgagacaatcttcagggcatcaatatccagcccggaatccgattcatcgaggatacacagctcaggctcaagcaccgccatttgcagaatatcgttgcgttttttctcgccgccggagaaaccgacgttcaccgaacgagttagcagatcttccggcatcttcagcagtttgatcttctcttccattaaatcctggaaatcgaaacgatccagcgcctccaggccgcgataggcgcgtacggcgttgagcgcggtttgcaggaaaaactgattactgacgcctgggatttccaccggatactgaaaagccataaaaatgccctccccggcgcgatcctccggggcgagttcgagcaggtctttgcccttaaactcgacgctgccgccggtgacttcgtaatcttcccgcccggcgagggtagccgagagcgtacttttccctgagccgttagggcccatgatcgcgtggacttcgccggggcgcacctcaaggttcagcccgcgcaggatctctttgtcttctacggcgacttgcaaatctttaatacttaacatcttttttccttaattatcagccgacgctatgttcaaggctaatagccagcaatttttgcgcttcgacggcgaactccagcggtaattctgagaacacgtctttacagaatccattgacgatcattgagatcgcatcatcttcgctaataccccgctgcaggcagtaaaacagctgatcttcgccaatccgcgaggtggtggcttcgtgttccagctgggcgctgttattgcggcattcgacataggggaaggtatgcgccccgcagtccgggccgatcagcatcgaatcgcactgggtgaagttccgggcgttcgtcgcggtcggcataattttgaccagtccgcgatagctattctggctgtgtccggcggaaatccctttcgagatgatggtcgaacgggtgttcttgccgatatggatcattttggtcccggtatccgcctgctgatggccgctggtcagcgccaccgagaagaattcgccgatcgagttatcgccgcgcagaatacagctcgggtatttccaggtaatggccgagccggtttccgactgggtccacgacatcttgctgttttcgccttcgcacagcgcgcgcttggtgacgaagttaaggatgccgccggtattgttgtcgccggggaaccagttctgcacggtggagtacttcacttccgcatctttatgaatgatgacttcaaccaccgccgcatgcagctgatagctgtcgcgtaccggcgccgagcagccttcgatatagctcacgtagctaccctcgtcggcgaccagaatcgtacgttcaaactggccggttttctcggcgttgatgcggaaataggtcgacagctccatcggacagcgcacgcctttcggcacgtagataaaggtgccatcggaagcgaccgcggcgttcagcgcagcgaagaagttgtcgttgcccggcactacggtaccgagatactttttcaccagttccggatgatcgtgaatcgcttcgccaaaggagcagaagatgatcccctgctccgccagcttctcgcgataggtggttgccaccgataccgagtcgaaaatggcgtccaccgccacttctttgccttcgcgtaccgataccccgagcaggttaaaagcttcctcgacttcatttgtcaggaaggtgtttgccccggtctgttgcaccgcgccgggctccgaggcgcaggtctcgtcgcagttgccgcaggatggcgccgagtagtagctataatcctgataattaagcttatcgtaatgcgctttcagccagtgcggctcctccatctcctgccaggccttaaaggcgttgagacgaaattcgagcatccactccggttcattacgacgagcggaaatcgcgcgtaccacctcttcattaatgcctttggccagctcatcggtttgtagctgggtaaaaaagccttctttatagttgagcgggccgccggtccagcttttgacatcgtcagttgcttcagtatttcgagacatagttactccgcctgaaccccgaagctttcgccgcagccgcattcgtgctgcgctttcgggttatgaaacttgaatatttcatttaagccttcgcgaacataatccagttcggtaccgtcaatgaacggcatcgcctgcagcggcgcaaacagcttggcaccgtcgcgttcaaacagcagatcgtcgtccgccggctcggcaatcatttccagcacgtagccaaaaccggcgcagccgctggttttaatccccaggcgcagtccctgtttgtccggctgtttgtgcatcagatcgcgaatatgggccgccgcagcgggggtcatcgttagcccctgccagttgaaatcgtcaggattaaaggtgtttgtttgtagttccatcgctctacctcatcgagtgccgccatcgggccataccctcatgttagtgataatgattatcacttcaaccctgccggagcaggggtattcggccatttcgcccgtttctgcgcttttctataagcatagaccctggtgaaggggttatcaggaagcaattcttatatttaatagattgataaataataagttattgagaataagagcgcaggcgaagcggcaatggaaaagatgtatcgaaaataccgatttatgcgatagagaccggaaatggcacttttcgtcagtgttggggatatgaagggggttaatctaccgcagaaaatcacaggataagcaggtcgttcataaaggaactctaatgacgaaggtcatcaaatttagttcgctcgcggttttggctgtcgtgttgtgcgggatatataaaaccgcgtcgattgccatggcggctagcgccgattactcgcgcgcggactggctcaccttctatctgattgcaccgagcgaagttaaacatgcccccctcatcaatgacagcacgccgattcacttcagggctgctgatggcgcctccccccagatagacgagattgaatacgccagggatacggacgaaaacatcttgtctgaatacctacgcgctttaggttatcgccaggaaaaagatccggtattcggcacccgctggtctttgcaaggcaccgataaaagcgcctatattgctgcgactgaaaattcaatcaggctgacgtttacggattgaaatacctgagacaacggatagcagctggcgttgtcgaactcccatcttactttcgcaaacaagcaacatacttttccccgctgcgacggacgatctccccggcgttattcagaatctcccgcccctcgaacgcgccgtagatttggctgaatttcacgccagcaaggcgatgaatgatatccgtaaccgttgatgacggcagcggtagcatattgggatagctccacatgaaagaaacggcgtttgctccgggcgccacctggacaatatcgccggataataggaggccgtcgccctgcgccccgtgcaggacgcagccaccagcaaaatgcccacccaggcgaatcagactggcatcggccgtcagttgcaggctatcgccctcccaaaaggtaatccacgggctgtctcgcatgacccactggcggtcatccccatgcaaatagattggcgccttgaactccgccgcccaatcctgcatacaactgtagtaatgcggatgtgagatagcgatggctttcagcccacccagcgcggaaaccagcgtttttgtcgcctcgtcgaggttggcgatgcagtcccatagaatattgccctgcggcgtacgcagcagaaatgcccgctgattaatggcaaagccaggaatagtgcgaatgctaaaaagcgcgctgttatgctgttgccacttattgctgtgcgatgcggtgagcttatttaatgcaatccactgctggccgcccaccggaataaattgccgctcgtcttcgcatatcgggcaatgttgcgcagggttttcgctaaattcatatgaggtaccacaagctttgcatagcgtaatcgtcatctctttctctctattccagcatccgataacaagcatggcacagcttattttagcggtgtggcagattgtgcagagcgcaaaaacctacctgctttggtagcgttctgtgttttttatcgtttgtcataacgggcataatcaaccggcaccagtagatgaacgatcgccggggaaaaggatgcgcaaatttacagcactactattaatggggttacttaccggctgctcggttaacgcgccgcaaagcgcgcaatacaatgccgagtactcccagcgccaggatatacgcacgcagaacgtatatcgatttaagatcaaaccgctgcaacccagcggcggaaaatattggggtgcggataatttaacgcaggttttttacgtcagtgataaaaatgccgcagccattgaattacgtttcaatttccccaccgccacgctgcaggcttcatcgttagacgagcaagggaaagtagtaagtactcaaacgttcgccttgttagccgaatccgcgacgccgccatcgggttcggacacgaagtatttatatctgacgaaaagtggcgagttacttagcaaatggcaaaactgtactccggatatgagcgtgggttgtagttgggggggacatcaaatatttatcacccacagcgccgatctggcagtgcagtatgcaaccggtggcgcgggtttagcttttctgctgattccattttacaattccgaagcccggctacagattttcgccaaagcgccaatcggcgcagctggcgacgaatagaacgattcaattttgtgatgcgatcggttaattcttaaaaacagggttggtttaggcagcgtttactcatgtacaattcgcgtcgtttgtaaatgtttaccgatgcaaagtcggattatggtttacgggagcgagtgtcgtacaggatgattgatatcagtattatgtcgatgtgcatggtagtgctgctggtgatgagcgtgttgctggagtaaccctccccctactgtttttgtcagcttatgtaaccccggaattaaacataaaattacctcgctgcttctccagccgggaagcagtcaggctgcgccttaccatcctgcaaaacggagtttacgccctttgtcaggaggcagccggaaaaatttgccaaaatgggttcgcccgcgggtatccagcgggcttttttttgtttacgagcgtctgtcgcgggcataaaaaaaccgccgtggtgaacggcggtttactgtttcagagtgaatatgtgctcggcgtattaactcttcactttacggtagataaacagcacaacgattgcgccaatcaccgccacaacaaagctgccgaagttaaaaccgtcaaccttgccaaagccgaataacgtactgatccagccaccgactaccgcaccgataataccgaggatcacggtgacaataaacccaccgccgtctttgcccggcataatccacttagccaaaataccagcgatcagaccaaaaatgatccaggaaatgatacccatggttaactccatcctctttgttaccgtgaaagtatttcgtaattaaaatagtagcataattacagcgaatgatttaacaaatatatatttattagatgattgcttgccgtttcgctagccctggtctacagattattcagtgctcgttaataacgaaaggggtgaagaatggggtattacgtactgaaaaagtctgataagagcgtcccacagccgtggtattttctgctgaaggcggacaaccatgagaccatcgccaccagtgagatgtattcatcgaaagatgcggccaaaaagggcatcgcctcggtgcagagaaacggtgccagcgaggtcattaaggacgaaacgcaataaacaagaaggggatgcaagcgcatccccttaaaatattctgcctaccgttacaccacggcggtggtcagtcgtgatgagcagcacaaacgcccctgctcatcggagatatcgatttgccacacctgatggcgcgaccccacatgtagcgcggtacaaaccccacgcacccgcccgctgcgtaccgaacgaatatggttggcattcacttccaggccgaccactttctgttccccttcggtacacagatagcccgcgaccgaacccagcgtttcagcaagaaccaccgatgcgccgccgtggagcaggccaaatggctgatgtgtgcggtgatccaccggcatcgtcgcttcaatagcgttatcgctgatggccacaaagtgaatatccagcaggccaaccatgttcccctcgcccatcgcgttaagctgcgctagcgaagcctgacgtttccaaatcatccgataatctccagcagagcctgcagcgggtgacgcactccgctgccttcgatacgcttcacctgactgcggcaggaataaccggtagccagacagcggctgcgcggtaaacgcgccatcgcctgctgccaggaaagcgcgtaaatcgccagcgagttggcatggtttttcacttcatgaccataggtaccggccataccgcagcaacccgtactgatgtactccattttcgccccaaaacgggcaaatatttccgcccactgtttgggcgcggccggtagcgccgtcacttccgtacagtggccaaacagataccagggttcgccgctattgtcctgaccggccgatggcgctatcgcctgggtcagccactcatgcgccagcatcacgcgaaaatcgccgcgtttctcgcccagcgtctggttatattcatcgcgatagcagagcaccagcgcggggtcgacgccaaccatcggtatatccagccgcgctacgcggttgagaaaatcagcggttttctgcgcggtacgcgcaaagcgcgtcaggaaccccttgatatgctgcgctttaccgttcggcgagaacggcaacagcaccggctgatagccaattttttcaatcaggcggacaaagtcagccaccacctgcgcttcgtaatagctggtaaacggatcctgtaccaccagcaccttcttcgcacgctgttcgacgctcatcgcctccagatcctcaagcgtggtattggcggaacgatggcctgccagctgctgcttgagcgacggcacggagagcaacggtagatcgaccataccgatatgtttttccgacagcttgcgcatccacggctgattgataaagaagttgaatgttttcggcgcctgggccatcagcggcgcgtaggactcgaccgtcgcgaccagatggtcgcgtaccggacgcaggtagcggctgtgataaagctgcaggaagcgggagcggaattccggcacgtcaatcttaatcggacactgggttgaacaggccttacaggccagacagccggacatggcctctttcacttcatgtgagaaatcatattcgcctttacgcgcatgccagctgttgcgggtacgctcgatcagggcgcgcaggcttacacctttctccgggagttcttgctccagtttgttcgggtctatcccgcggtcggccagcaggcgtaaccattcgcgcaccagcgtcgcgcggcctttcggcgaatggatgcgctgattgctgaccttcattgacggacacatcgggctttttacatcgaagttaaagcacagaccgttgccgttacactccatcgcgccgcgccaggcgctacgcacggcgatgggaatttggcgatcgtaggtgccgcgtttcaccgcatcgactttcatcatcggcgcgtcaacgccttcaggcgggcaaattttccccggattcaatcggttatccggatcaaaagcggctttcactttacgcagttcgctatataactcctcgccaaagaaggccggactgtactcggcgcggaaacctttaccgtgttcgccccacagcagaccgccatattttgccgtcaacgccaccacctcgtcggagatctgcttcatcagcacctcctgctgcggatcgcacatgtccaacgccggacgaacgtgcagcacgccggcgtcgacgtgtccaaacatgccgtagctcagaccatgtccgtcgagtaaagcacgaaactcggtgatgtaatccgccagatgctctggcggtacgcaggtatcttcagcaaaaggaatcggtttagcggcgcctttagcattgcccagtagacctaccgcctttttacgcatggcatagatgcgctcgacgccatccagttcatgacagacctgccagccaatcaccccggcggcgccctgcgccatcagctcatcaagacgctgacacagggtggttacctggccatctattaattcagcatcatcaccggcaaactcaacgatattgagccccagcatctctttttccggcacatcggcgatcagttcgctcaccgagtgccagacgatatcttcgcgcgccagattaaggaccttcgaatcgacggtctccaccgacagcgcctttgcctcaaccatgaagggggcgttacgcagcgccgaatcaaaagagtcatacttgacgttgaccaaccggcgtaccttcggcagacgcgtaatatcgagccgcgcttcggtgataaatgccagcgtgccttcggagccggtcagaatgcgcgtcaggtcgaactcgctcatctcatcattaaagacatgacgcagatcgtagccggtcaggaagcggttcagtttcgggaatttatcgatgatcagctgacgctgcgctttgcagcgctgatagacggtacggtagatgcggccaatcgctgactgctcgcgccccagcgtttccgccagcgcggcgggaatgggtaaggtatcaaggatatcgccgcccatgagaaccgatcgcaccccaagcacatgatcggaggttttaccgtagaccaatgacccctgtccggaggcatcggtattgatcataccgccgagcgtcgcgcggttactggtcgacagttcaggggcaaagaaatagccgtagggcttaagaaactggttaagctggtctttgattaccccggcttctacccgcacccatccctcttcggggttgatttcgataatacggttcatatagcgcgacatatcgacgataatccccgcgttcagcgcttgaccattggtgccggtaccaccgccgcgtggggtaaaaatcagcgatttaaagcgtggctccgccgccagtcgcgccagtaaagcgacgtctgcggtggaacggggaaacagaatggcgtccggcaacagctgatagacgctgttatcggtcgccatggtgagccggtcggcatagctggtggcggtatcgccggtgaaaccttgttgctccagtacttgcaaaaaattcagcaccagctgaacgacgcccggcgcttgagaaatctgtgggatcatgacgcttgaccctgcctgaatatgttgtgtttagaagatgtaataatgcgcaaattaaacgtttgcgtggcgcactcaactttttatcacatttttttcatatccgcccacgagatttacgggcaaaatcaggcgcgcgaaattattgatattattatctgtacatggaattacgctgcgtcagcattgagacgcgactggaaaggtaaattttctctatgattaaccaacatcagccccgggacataccgcaaatactgctgtcggtgctgtttttgtccctgataattatttcctgcctgtgggttgtgcaaccatttattctctcttttgcctgggccggcaccgtggtcatcgccacctggccggtgctgctgcgtctgcaaaagctgctgtttggcaagcgctcgctggcggtgctggtgatgacgctgctgctgtttttactgttcgttattcctatcgccttactggtgaatagcctggtcgataatagcgccccgctgatcaaaatcgtcagcaccggccaggtaacgctgccggatttcgcctggctgaactcgattccgctgatcggcgataaactctattccgcctggcatagcctgctggagatgggcggcgcggcgattatggctaaggttcgcccttatattggcgctaccaccacctggtttgtcggccaggcggcgcacattggtaaacttctggtttactgcggactgatgctgttgttcagcgccctgctttactggcgcggcgagcgtgtcgcctatggcttccgctatttcgcgacccgtctggcctcaaagcgtggcgatgccgcggtggtcctcgccggacaggcggtacgcgccgtagcgctgggcgtggttgtcaccgcgctggcgcaggcggtgctcggcggtatcgggctggcgataagcggcgtgccttacgccgcgctgttgaccgtggtgatgattttcacctgtctggtacagctggggccgcttatcgtgctggtcccttcaattatctggctatactggaccggcgatacgacctggggcacggtgctgctggtgtggagctgcgtggtaggtacgatggataacgtgattcgcccggtactgattcgcatgggcgccgacctgccgatgattctgatcctctccggcgttatcggcggcctgatcgccttcgggatgattggcctgtttatcggtccggtgctgctggccgtctcctggcgtctttacgacgcctgggtacaggaagtgccgccaccgccgctagacccggatctggttctggcggagctcgccgagcttaatgccagccataacaaaagcgaaaagtaaccgaaaggcggggaaacccgccttaaacttaagctaaatttatcaatcccccgccacttccggcatattcatgttccagctcgatatttacctctcatattcttcacactgatttaactattgagaagaatccgatcgacgccaacagccctgatgcctactattagcccacggttatagatcaagatattgatttataagcatggaaatcccctgagtgaaacaacgaattgctgtgtgtagtctttgcccatctcccacgatgggcttttttttacgtcaaaaccaaccatcgcgaaacgttgctgaaggcaaaaaaaatccccggcatctctgccagggattgggctatccgcgttgaacttatttattcagttcagccagacctaaccaggtttgcaccacggtatccgggttcagggacaggctatcgatcccctcttccatcagccaggcggcaaagtcttcgtggtcggacggcccctggccgcagatgcccacgtatttgccctgttttttcgccgcgcggatggccatcgacagcagcgctttcaccgcgtcgttgcgttcatcaaacagctcagacacgacgccggagtcgcgatcgaggcccagcgccagctgcgtcatgtcgttcgagccaatcgagaagccatcgaagtactcgaggaactgctccgccagcagcgcgttcgacgggatttcgcacatcataatgatcttcaacccgttctcgccgcgcttcagtccctgacgttccagctcttcgaccaccgctttcgcctgcgccacggtacgtacgaatggcaccatcacttccacgttggtcaggcccatgtcgttacgcacgcgtttcatggcttcacactccagagcgaagcaatcgcggaagctttctgaaacgtagcgtccggcgccgcggaatccgagcatcgggttctcttcttccggctcgtaacgctcgccgcccaccaggttggcgtactcgttagatttgaagtcggacaaacgcacgatcacccgtttcgggtagaaggcggcgccaagggtagcgatcccttcggtcaggcggccaacgtagaactctctcggtgagtcgtagcctttcatcagctcgcggatttcgttctgcaggcccggctcctggtcgtcaaactccaacagcgcacgcgggtgaacgccaatcatgcggttgatgatgaattccagacgcgccaggcccacgccttcattcggcaggcaggcgaagtcaaaggcgcgatccgggttgccgacgttcatcatcaccttcagcggcagattcggcatctcgccaacgcttgagctcttcacgctgaagtccagtagctccgcgtagacatagccggtgtcgccttcagcgcaggaaacggtgacattctggttttcctggatgcgatcggtcgcatcgccgcagccgaccaccgccgggatgcccagctcacgggcgataatcgccgcgtggcaggtacggccgccgcggttggtgacgatcgccgaggctttcttcatgatcggttcccaatccgggtcggtcatgtcggtgaccagcacgtcgccaggctcgatgcggttcatctcactgatatcgtgaataaccttgaccgggccggcgccgatacggtggccgatagctcgcccttcggcaatgatctgcccctgggcatgcagcgtataacgctccatcacctgaccgcgcgaacggacggtttccgggcgcgcctggacgataaacagcttaccggtatggccatctttcgcccactcgatatccattgggcgaccgtagtgcttctcgatctgcaccgcctgcttcgccagctcttccacttcctcgttggttaacgagaaaacatcgcgctgcgcctgcggcacatcttcaatgcgcacctgcttgccgtgttcctgagtcggcgcataaaccatgcggatttttttcgaccccatggtacggcgcacgatagccgggcgattagccgccagggtcggtttatggacgtaaaattcgtccgggttcaccgcgccctgcaccaccatctcgccgagcccccacgccgaggtgataaacaccacctggtcgaaaccggactcggtatcgatggagaacatcacgccggaggaggccaggtcggagcgcaccatcctctgcaccccggcggatagcgccacgccgcggtgatcgtaaccctgatgcacgcgataggagatcgcgcgatcgttaaacagtgaagcgaatacgtgcttcacggcaacgagcacggcgtcaaagccctgcacgttgaggaatgtctcttgctgaccggcgaaggaagcatccggcatatcttccgccgtcgcggaagagcgcacggcgaacgaggcctcggcgtcatcggcggacagcaggtcataagcttcgcgaatcgcgttttccagttcgctctggaagggggtgtcgatgatccactgacggatctgcgcgcccgctttcgctaatgcggaaacgtcgtcaatgtcggtttcatccagcagtgcataaatgcgctggttaacaccgctttggtccaggaactgatcgaaagcatcagcggtggtggcgaacccgtttggtacggagacacccataccggacaggttagtaatcatttcaccaagggaggcatttttgcccccaactctgtctacatcattcatgccgagttggttataccaaagcaccagcggtgacgagccattgttggacatcgagacaatccttttgtgatttaatacaaattatagaaaacacacgatcgactacggtattcatcctgacatatttatgccgctgaaaaaaacggtgaatcgttcaagcaaattaattttctgtttttcggattgttttccagaattgtctaactctatgattaaaatgaactctattgatatttgatacaaataatgggcaaaatcagaaactggacctgccatttcattaaaaacaaaaatagcgtttcatttttttaagtgagacaaaggttaaagctctgtgcttaaatttactctgcttttagataattataccggatggtcaaaatggacagtgctgtagatcgccacgtattttatatttctgacggtaccgctattacggcggaagttttaggccatgcggtaatgtcgcaattcccggtggctatcagtagcgtaaccctgccgttcgtcgaaaacgtcagccgcgcccgggcggttaaagagcaaatcgatgccatttttcaacaaaccggcatccggccgctggtcttctattccatcgttatccccgaaattcgcgacattattttgcaaagcgaggggttttgtcaggatatcgtgcaggcgctggtagccccgctgcaacaagagttacatctggatcccacgccggtggctcaccgcacccacggcctgaatcccggtaacctgattaaatacgatgcgcgtatcgccgccatcgattacacgcttgcccacgatgatggcatctcgctgcgcaatctcgatcaggcgcaggtgatcctgctcggcgtttcgcgctgcggcaaaacgccgaccagcctgtatctggccatgcaatacggtattcgcgccgctaactacccttttatcgccgacgatatggataatctggttctcccggcctcattaaagccgctgcagcacaagatgttcggtctgacgattaacccggagcgactggcggcaatccgcgaagagcgccgggaaaatagccgctacgcctcgttgcgccagtgccgcatggaagtgaccgaagtcgaagcgttgtaccgcaaaaataagatcccctgcctcaacagtaccaactattcggtagaggaaattgccaccaaaatcatggatatcatggggctgaatcgcagaatgtactaacacactagtacattattgaaaatttgtttatgctatcgctcgtggcctatacaggatcatgccctgctcttgcaataagcagggattggtttatcgtgatgcgcatcacttcccggcattttcgccgcggaagaaacagatttttgagaccccaatgaataaaacagacgaattgcgtaccgcgcgcattgaaagcctggtaacgcccgcggaactggcgcagcgccatcccgtgacggccgaggttgccgcccacgtctccgcctcccgccggcggattgaaaaaatcctcaacggcgaagaccgccgcctgctggtaattatcggcccctgctccattcacgaccctgaagcggcgctggaatatgggcgccgcctgcagggcatgcgcgaacgttaccagccgcagctggaaattgtcatgcgcacctatttcgaaaaaccgcgcaccgtcgtgggctggaaaggtcttatttccgaccccgatctcaacggcagctaccgggtcaatcacggtatcgaactggcgcgtcgtctgctgctgcagatcaacgagctgggtatcccaaccgccaccgaattcctggatatggtgaccgggcagtttatcgccgatctgattagctggggcgccatcggcgcgcgcaccaccgaaagccaaatccaccgcgagatggcctcggcgctctcctgcccggttggttttaaaaacggaaccgacggcaacacccgtatcgcggtcgacgcgatacgcgcctcgcgcgccagccatatgttcctgtcaccggataaacagggccagatgaccatctaccagaccagcggtaacccgtacggccatatcattatgcgcggcggtaaacggccaaattatcatgctgcggatatcgccgccgccggcgaagcgctacgcgaattcgatctccctgagcaactggtcgtcgacttcagccatggcaattgtcagaagcagcatcgccgtcaactggaagtgtgtgccaatatctgccagcagatccgcgagggctccaccgccattgccgggatcatggcggagagcttcctcgccgaagggacgcaaaaagtgatccccggtcagccgctgatctggggccagtcgattaccgacccgtgcctgagctgggaagatagcgaaaaaatgctcgctgaactggctgcagccaccgctacacggttgtaatccctccccccgccgcgctcgcggcgggatttcaccgctcgccgttcatcctatgcgcaataactacctgaaatggtaagccacaacaaaaaaggcttgccgtgaaaattaacattactgataatgattatcattgttgcttttatttttattttggtgctatgacgcgtatggataacactgccacagctgagaaaacgaaagacaatgctccctatccccttgccagcgatcgccaaatcagcagccggacgctgttgggtgcggaaggtcgcgtggtgatcgaacatgacggtcagcgctatctgctgcgccagacccacgccggtaagctaattttgaccaaataaaaccccgcgcgatggcgaggctttacggttagctggagcagctcacttccagatgtttaccccaatcaggcgggcggctggcataatcatctgtacgatcggcgaacggctgcgcgagggcttcatgcagacgttccagctcgcgcatatcgccagcttcggcctgttctatcgcccgctgcgccagccagttgcgtagcaccagcgccgggttgacgccctgcatccgctgctggcgttcgctatcgtcgatctgttcatcgcgcagccgcgcccggtagtcggcaaaccagctatcaaaggccgcgcggtcgataaactcatcacgcagcggcgatgccgcgctgtgctgctcgctttggctcagcatccggaaggcacgagtgtagtcactcccttcacgttccatcagactgaacagtccatcaagcagagtgttatcaccggtttgctgagtatagaagccgagtttgtcgcgcatgcggcggccgtaggcagtcaataaggcaggctgatagtcatccagcgccgcgttcagcgcgtcggcgctgatgaacggcgagagcgactgggccagacgctgcaggttccacaaccctaccgccggttggttatcaaagctgtagcgcccctggtaatcagagtggttacagataaaaccgggctggaaatcatcgaggaagccatacggaccataatccatggtcaggccaagaatcgacatattatcggtattcatcaccccgtgggcaaagccaacggtctgccagctggcgatcatttccgcggtacgcgtgacaacgtcacggaaccaaagaatatacttatccgcctcctgctgcagctgcggccagtggtgttcaatcacataatctgccagctgctgaactttttccgcttcgcgacgatagtaaaaatgttcgaaatggccaaagcggacgtggctttcggcgatgcgcatcagcatggtgccgcgttcttcgcgttcgcggtaaaccggcgtgtcgctggtcaccatcgccagcgcgcgggtggttgggatccccagcgcatgcattgcttcgctggcaaggctttcgcggatagtcgagcgcagtaccgcccggccatcgcccattcgcgaatagggcgtcagaccggcgcctttaagatgccagtcaaaacgttgaccatccggcaactgctgctcgccaagcagaattccgcgcccgtcgccaagctgaccggcccaggcgccaaattgatggccgctatagacctgcgccagcggcgacattcccggcagcaccgcttcgcctccccagacgcccgccccatgttgcggattaaataacgtctccgggacgcccagcgtttgcgccagagcggtgttgcgccagatgagacgcgcgttatccagcggcgtgggcgccagtgaagtgtaaaaacccggcagccgatcgcgccagtgagtagtaaaagacagggtcatggttcctcctgccgccagtgtagtgccttcaacaggggattaacacgggcgaactgcagggttatggcaattaaaaaagggagctctcgctcccttttctcgccagatgcgggttaaatgcgcctcgcctgccagaatttcttattccagtagacgttgtccagcgacgagcgggttacgccctgactggtggaggcgtgaataaattgattgtcggtatcatagataccgacgtgcaggccgctttcgccggagccggttttgaagaacaccaggtcgccgggcaacagatcgcttttatcaatacgggtgccgatttccgcctgctcgcgagtttcccgcggcagctgcatggcgaatttgtcacggaacgtgcgtaccacaaagcccgagcagtcgacgccgcgtggcgtcatgccgccatagcggtacggcgcgccgcgccagttgcgcaattgctcattgagattggctaccacggtaatggaatcagccagccgtggattcggcggcggcgcgcggtggctgctacagcctgccagcaccatcgccgcaataagaatgaaccacacacgcatctcagacgattcctctgttccctgtcctgttattgcaataatttagcttgtttagcggcttacaggcaagatccttacccgctactgtgacgccacgagcataagatgacccgcgacttccacccgctggaaagcgatatgataagcggcggtcaaattctcttcacttaacacctcgtacgtttccccgcaggcaatcatctgcccctcacaaatgagccacgccctctgcgcatgacgcaatgtatggttgagatcgtggctgctcatcacgatagcgatccccagcgcgcacagcgacgccagcacgttatccagcgccgcctgctgcgccacatcaaggctgttcattggttcatccaataacaacagctgcccggctggattcgcgcgccggtgaatctgcaggatcaccgccgccagacgcacccgctgccactcgccgccggagatctggttgacctggcgccccagcttatcgcttaagctcagttgcccggcaatctcgttgagcaactcctgcggggcgctatcctgcatatgtaacgacagatagtgccacaccggcatcgcgaagggcgggagctgctgctggctcagataggcgcgatggcgggcaagctccgctgcgggccactgagccagcgcccgctggttaagcgtaatcaaaccgggaccgctggtcagcccggccatgcgcgccagcagggtacttttgccggcgccattcggccccaccagatggactatctctccgggccgcacgtcagcggtaaacggcgacagccgccccgcttccgctacatcctgtagctccatcaaaaacggcattattgcgccagcgctccttttaccgcagccagcagttgcggatcgtccggcgtcatatccggcgagaaacgctgaatcacctggccatcgcgaccaacgaggaatttttcaaagttccacaggatgtcatcaacgtacagcggtgcgcgccctttactggccatccgctcataaaacccgctcccttccggtgcgacggccttcggggcggcggcaatcaatttttgatacaacggcgcgcgatgttcgccgttgacgtcaattttactgaacagcgggaaggtgacgccgtaggtcatgctgcagaacgttttaatttcttcttcgctgcccggctcctggccgagaaactggttacatgggaagccaaggacgctaaatccctgcggggcaaactcttcttgcagcgcttccagttgctcatactgcggcgtgaggccgcattttgaggccacgttaacgatcagcagcacctttccggcatacgctgccagggtggttttctcgccatcaatggtcgtcacttcggtattaagaatgtcgtgttgcatagccttccctcagtcaataatgcaggttaagaagatccctatctactgtagcggattcaacgcgcttgattctactttgattcgcgggcaaatgtcgcttgatgtgacagcgctgcgcttgccaacggcaacatgaattcctctcaatatccgcagcggacaaatcagtgtacagtgtgaaaagtatgtaatagtgtttcgttacttgttaatttaagagagtttttagagatgaagaagttgttaagctcggtgttaatcgccacatcggtggcgctgttatccgcctgctctccggacgataacaataaggttaaagtcgcgatcaataccggcccggatgaagctatctggaaagtcgtagagcaggtagcaaaagataaatataacctcgatgttgaggttatctctttcaatgattacgtcctgccgaatgaagcgttaaataataaggatgtcgacgctaacgctttccagacgctgccttatctcgaagcgcagtcgaaagagcgcggctataaattcgccatcgtcggtaaaacattcgtcttcccgattgccgcctattcgcgcaaaatcaaaaatatcagcgaactgcctgacggcgcgaccgtctctatctctaacgaaactaccacgcttggccgcagcctgctgctgttacaggcgcaaggattaatcaagttgaaagacggcgtaggctatctgcccactacgctggatatcattgataacccgaaacatctgaagattgtcgaagtcgatactccgcagctgacccgtacgctcgacgacccgaacgtaacgctggccatcatcaacactaatttctcggcgcaggtcggtttatccgccgcccgcgatggcctgtttatggaaggcccggattcaccttatgtcaatgcgattgtggcgcgcgaagataataaagacagcaagaaaattcaggagctgaaagaggccttccagaccagggaggtcgccgataaagcgcaggaagtctataaaggcgatgccatcaaaggctggtaagcgtcccccgacgccgtccatgctgacggcgtctccctacccccgtcgccctgaacgcagcagcaaccagatgaacaccggcgcccccagcgtcgccgtcaccacgccgatcggtaattccgccgccgataacgccagccgggcgatgatatcggcgccgagcagcgcgctggcgccagctaacaggcaggcgggaagcagcacccgatgatcgctcaggccgcacaggcgcaaaatatgcgggatcaccagaccaataaagccaatcgcccccgccagcgccacgctgacgccgaccagccagccggtggccaccaccagtagtttgcgccatagccacagcggcaggccgagctgacgcgccgagacttcgcccaacgccagtaaattcagcggctgcgattgccagcatacccacagcagcaccggtagcagcgccagcatcagccacagctgctgccagtcgacaccgccaaaaccgcccatcatccagtacatcagctggcgcaggtcaaaagaggttgagaaatagaccgcccaggtcatcaacgcgctacagataatgccgagcgccacgcccgccaacagcagacggctggtggacaggtgacgccgggcgaaacggagcagaataaaggtaatcagcagcgcgccggcaatggcgcacagccccagcgcccacatgggtaacacgccgtggcctaacagcacggcggcaatcagcccaacgcccgcgccgttagagacgcccaacagtcccggttccgccagcgggttttcaaacagcgcctgcatgatcgcgccggaaagcgccagcgccgcccccactaacagcaccgccagcgtgcggggcagacggatttgccagataaacagctcgcctttggcgctaaaccactcctgcggcgggatccattggtcgccggcgcacaggctaatagtcaatgtgacgagcaggatcagcgttaaggcggttagccaacgacggttatggcgctgttgaatatcggcaaaggtctgcataagtcccggaggcaagtgagcgaggtgattgattttacggtggcgatggcggggagaaaaggaaaaactctgagtcatcaccacgctggcgccagcgctcctcgtgacgccagcgtgggaatggaatttacaccaatacctggaacagtaacgcgaagagaatgatattcgccaccacaatcgcccagccgttatacagcatgtatttcaggtgggtagactgcgccagccccatttgaccaaacatatccgaagaggggaatgggccaaaccagtcgacctgcgaagaggccagtaacaccgcggtagtcccctgcggcggcacgccggcggccattagcatcgggccgaaaattttgtgggtgaaggtcatctgcgccaccgccgcccccggtacgtggccaataatattgaaagcgaagatgcaaaagcacaaccaggcaggcgaaataccttccagcagcggctgggtatagtcgagcagcccctgataggcatgaaggccatccatcagctccaggatcgggttatacagccagtagaggataaacatccacaccagacggccacaaccgtggtacagcgcctgcaggatctgcgtcggacgcaggccgcccaccagcccggtaatcaaggccaccagcagcatcacgataatcgcaaagctgaatccggctttgatcaccacgccaatgaccgccatcacaataatcgttgccgcgaaggccaacgcgctgagcttacgccgacgcagctgcgcagcgctcagtgcttctgttggcttctccgtgagatcgacttcatagcgtagttttccttcggtcatcttctggatccgccccgccatcacccagccagccagcagcgtcaccgcgctcatcggcagccccacgtacagcagataatccggatagcttaatccgccgaggctcaggatagtcacggtgctgggggtaaacggcccggtaaacaatcccacggatccggcggtcatcatcagcgcggccaccgtcggcggagtcaggcgtaccgctgccgccaccgggatgatcaccgcgacaataatcgcgttaccaccagccatcgtccccagcgagccgcagattaaaatcgaggacaccacaatgccaaacttcactcgggtctggctggaaaggccgatgcggtgaaccacaaatttcactaactcaaccgcggcgccggtacgggtggcgacttcgcccaccccggcgccgagcataataatcagcccgacggtggcgataaatgaaccggtggatttcgccaacatggtgcccatttccggcaacccggtggaggtcataatcatggcgataataattgaagaaatcaccgccagcacaatatcgacaccgaccagagacagcaccgctaacgccactaatggcgtaaagcccaacaggccgagttcattactcgggcggccatggcaccaccacgcggtcaacacaaacagcaccaataacaggccaataataacgttttttcttgtgatatttcgtctggcgagcgtattgccagcgagcgttgagtcactcatataactccttaaagccattagaaccgaccgcgattgcaggttggcgtattcgggcctgctcagaaaatatcccccctcgttatcattattggcttcatggcctgagggtttgtagggtacaaagggaatggttctgagaacgtaaaagaccgcctgaagacggtaccagcagcacaatatgtaaccggagcgctgattggcgattaaatttatgttaatttagtgttagtagaaaatgactttttatcggcaagctataaccctgagttaactgttcatgaaactgcgccatctggaaatcttctacgccgtgatgacttgcggctctctttcacgtgcggcggaatcgctgaatatctcccagccggccgccagtaaagtgttaaaaaacgccgagcttaagctcggttttaagctgtttcagcgggtacggggtaagctgctgccaagtagcgaagcgctcacactttttgaaaaagcgcagagcatttatcaggatctcgataacctgcgcctgctggcggataatctggcccgcgatccgcgcgccaaaattaccttaggctgtttaccaagcctcggattaagcctggtgccggagctggtgaccgatttttatcaacaaaacagtaatctggtgatgaccttaaccaccgagcatactgagacgctggtcaagaaattggatctgcgcgaaatagatttagcgctgacgctgcagccggtccagcagggggagatcatcaccaccctgattgccgaagtgccgctggtctatatcgaccgcgactaccgacaaggcgcggtggacatcaaagagatcgatcagcagcgctggatatcgccggggccgcattcgctctctgccgccatcgccacccgccgtgatttttccactacccggcttaatgtacagacctactacatggccaccgagttcgtgaagcgcggtatcggctgcagcatcaccgatatcttctcggcgcggcataatctgtcgccggagatgattcacccgattacgccgccgatgaaaatcaacctatgcctgctgcgtcgcgccgatgtttcgctcagccccatcacacagaaatttgtcgattttctgtgtaaacagctgcgtcaacagctcaaagaaattaacctgcagttataccctgaccataaaaagtcaattgcgccgctggggtaaatgctttgacataaccgcaagatatttatcagcggtggatatatcaggttatgaaaaaacgcattgtgattatcggcggcggcgtggtagggctggccaccgcctgggtattaattaagagcggacaccaggtgcagctactggagcgcaacgccgagccgggcagcgccacaagtttcgccaacggcgggcaattaagctaccgctacgtggcgccgcttgccgaccgtggcgtccccctgcaggggattaaatggatgggcaaagccgattcgccgctgaatatgcgcctgcaaatgtctttccagcagtggcgctggctgttgcagttcctgcgcgcctgcaatagccatagcaacaaaattaacggcgatcatattttacgcttatccctgctcagccgtcaggttatgcagtcgtggcttaatgaagataatcttgctgattttcactggcggcgtagcggtaaactcattattcatcgccgggagtacgactttcataaagcggcgaaagggattaatccccagtatcagcatgccctgagcgccgaagcctgcctgcagctggaaccggcgctgaaacacatcagccattcgctacaaggcgggatttattcaccgggagatgaaacggcagactgccataaattctgtctcgccctgctcgacaaactcaatgccagtagcaacttcagcctgctcacccactgcgaggtgctgcgactcaataagcgcgacgggcgcatcagttcgcttgagaccagccgcggtacaataaccggcgatgattatgtcgtcgccgccggcaacggtagcggcccactgctgggtcatctgggcgtgcgcgtgccgctgtgcgcgctgaagggatacagcctgacccttccctaccctaaagaggccggaatcgcgccggatatcagcgtgaccgactacggacacaaaatcgtttacgcccgcctgggcgatcggttacgcatcgcggcgatggtggatatcggctacgacggtgaagaaatacgggatagccgcgttcaggcgctgaaaaatatcgtcgcgaacagcttccccgatctgcaggggctggatgaggctgaaggctggaccggtatgcgcccgtcgacgccagcgggcccaccgatgctggggcgcgccggataccagaatctgtggatgaatctcggccagggtagccttggttttacgctcgcggccggcagcgccgtgatactgggagcactcctcgatggcgaagcgccggcaatttctttagatggtctgacatggaaacaatccgcatgacaattattcgtaataatccgcaaccccgactttccgccagcgtcgagtacggcaacctggtgtttctctccggccaaacgccgaaaagcagcgctgatgatattgcgctgcaaacccgcgaagtactggagaagatcgacgctctgctggtcgccgccggtagcgacaagcagcacatcctttccgcacaaatctggcttaaagatatctcacgcgattttgccgcgtttaatgaggtctgggtgaagtggatgccggaaggccatagcccggcgcgggcggccgttcaggccgagatggcgcggcccgacatcctggtggaaatcatggtcaccgccgtaaaagcgtaagataaaacaggtaagaaaaaaggccgcatagcggcctttttaattagtcagtccagattatttctctctgggtgaagcgttttcgacacggctttttaacttctgtccgggtctgaaggtcaccacacgccgggctgtaatgggaatatcttcccccgttttcgggttacgtcccgggcgttggttcttatcacgcaaatcgaagttgccaaacccggagagttttacctgttctccgttttccagagcacgacggatctcttcgaaaaacaactctaccagttctttggcatcccgcttgctaagcccaagcttatcaaacagatattctgacatttcagcttttgtaagcgccataggttcaatccctcaatgatgcctggaatcgctctcttaatgcctctacacatttggcaacggtagcggcaatctcctcttcttcgagtgtacggctggtatcctgaaggatcaggctaatcgcaaggctcttaaagccttccgccacacccttaccacggtacacgtcaaataagtttacgccaactacctgatttacgccaactttcttacattcggccaaaacatcggctgcagggacgttttccgcgaccagtaccgcgatatcgcgacggttcgccgggaagcgagaaacttcgcgcgactgaggcaccacgcggtctgcaagcttgttccactcgatttcgaacaccagagtgcggccgttaagatccagtttacgttccagttccggatgaacaaccccaatgaaaccaatgcgttcacctttcagataaatcgccgcggattgtcccggatgcagtgcggtagccgcttctgcgcggaattcgatatcggctaatttaccggtcagatcaagaacagattccagatcgccttttaaatcatagaaatcgacggtttcttttgccaggttccagtgttcttcgtagcggttaccgctaatcaccccggccagcatcacatcctgacgaatgcccagcggcgcctgagtatccggcacgaagcgcagaccgctctcaaagatgcgcacgcggctctgttgacggttctggttgtagacgacggtgcccaacaggccggtccacagcgacaggcgcatcgccgacatttcgctggagatcgggcttggcagaatcagcgcctcttcaccggcgtggattagctgctgtactttcgggtcaacgaagctgtaggtaatcacttcctgataacctttgtcgttcagcagcgttttcacgcgcttcagcgacagatccgcttcacggtgggttcccataatcagacccgcctgtaccggctcgtcaggaatgttgttgtagccgtagacgcgggccacttcttcaaccaggtcttcttcgatctccatatcgaaacgccagcttggcgcaacggcctgccactggtcctgaccaacggtcacttcgcaacccaggcgctgcagaatgtcgctaacctgcgcgtcatcgatatgatggccaatcaggcgatccagcttgctgcggcgcagggtgatggtggcgcgttttggcagcgtctcttcgttggttacatcgataatcgggccggcttcaccgccgcacaggtcgatcagcagacgggtcgcacgctccagcgctttatactgcagagctggatcgacgccgcgctcgtagcgatgggatgcatcggtgtgcaggccatgacggcgcgcgcgaccggtgatagacagcgggctgaagaacgcgcattccaacagcacgttctgggtttcatcgttaacgccggagtgttcgccgccgaagataccacccatcgccagcgctttcttatggtcagcaataaccagcgtatcgctatcgagcttagcttcagagccgtccagcagcaccagcgtttcgccctctttcgccatccgcaccacgataccgccgtcaatgcggtcgcggtcaaaggcgtgcatcggctggcccagttcaagcagcacgtagttggtcacgtcaaccaccgcatcaatagaacggataccgcagcggcgcagtttttctttcatccacagcggggtcggcgctttgacgttgatgcctttcaccacgcggcccagataacgcgggcacgcctgcggcgcctcaacctgaatcggcagcacgtcgtcaatggtcgcggcaaccggagtgatttccggcgcgttcagcggcgctttgttcagcacagcgacatcgcgcgccacgccgatgatacccaggcagtcggcgcggtttggcgtaacgctgatttcgatggtattgtcgtcaagcttgaggtattcgcgaatgtcggtaccaatcggcgcatcggccggcagttcgatgataccgctatgatcgtcggaaatacccagctcggagaaagagcacagcatcccttctgacggttcgccgcgcagtttcgccgctttaattttaaaatcgcccggcagtacggcgccaatggtcgcgacggccaccttcaggccctgacggcagtttggcgcgccgcagacgatgtccagcagacgctcgccgccgacattgactttagtaacgcgcagtttgtcagcattcggatgctggccgcactcgaccacttcaccgacgaccacgccgttgaagctaccggccaccggctcaacgccgtcaacttccaggcccgccatggtaatctgatcggacagcgcttcgctgtcgatcgccgggttaacccattcgcgtaaccacagttcactgaatttcattgttctgtcctgcccttatttaaactgtttgaggaaacgcagatcgttttcgaagaatgcgcgcaaatcggtcacgccataacgcagcatggtcagacgctccatgcccatgccgaaggcgaagccggagtatacttccggatcgataccgacgttacgcagtacgttcgggtgcaccatgccgcagcccagcacttccagccattttccgtttttacccatcacgtcaacttctgcagacggttcggtgaacgggaagtaggacggacggaagcgtacctgcagatcttcttcgaagaagttattcaggaaatcgtgcagggtacctttcagattggtgaagctgatgttcttatcaacaatcagaccttccatctgatggaacatcggggtgtgggtctgatcgtaatcgttacgatagacgcggcccggcgcgataatacgaattggcggctgctggttttccatggtgcggatctgtacgccagaagtctgagtacgcagcagacgggtcgcatcgaaccagaaggtatcatggtcggcgcgagccggatggtgacccggaatgttcagcgcatcgaagttatgatagtcatcttcgatttccgggccagtcgccacggtaaagccgagttcgccgaagaagttttcgatacgatcgatggtgcgggtaaccggatgtaaaccgccgttttcgatgcggcgacccggcagcgagacgtcgatggtctctgccgccagacgggcattgagcgcggcgccttccagctcagccttacgcgcgttcagcgcctgctgcacctgctctttcgcttcgttaatgaccgcacccgctgccgggcgctcttccggcggcaactcacgcagggtggtcatttgcagggtcagatgcccttttttacccagatattcaacgcggacgttgtccagcgcggcaacatctgatgcctcgttaatggctgccttggcactggcaaccagctctgcgagatgtgacatggttttcctcattatgtcggtgcagacaccggttttagtgaaataaatatcccgaatctatatacgaaaaaagcctccacaggggaggctttctggcgctgttttccgtttcttctttcacgcgctagcctcctgagttcaggtgctaaagtaaaaaaagaagcggaaaatagcagcattcatgcttgcattaccttgtctggtaagaaatgtcagacctgtattgaaaagcctgcacggataaaagtcaatgtattgatagtgttgaaacgaaaagagggagacaagctccctctttcaactggcttatgccagagctgctttcgctttttcgaccagagcggtgaacgctaatttgtcgaatacggcgatgtcagccaggatcttacggtcgatttcaacagaggcttttttcaggccgttgatgaatttgctgtaagaaataccgttctgacgtgctgctgcgttgatacgcgcaatccacagttggcggaactgacgctttttctgacgacggtcacgataagcgtactgaccagctttgataacagcctggaaggcaacgcggtatacgcgagaacgcgcaccgtagtaacctttagcttgtttcaaaattttcttgtgacgtgcacgggcaactacaccacgttttacgcgagccatatgtgctctcctgtatctattctaattaaaaagttaaaagggttaacgacttatgcgtacggcaggcacgcgattaccaggcccagatcgcctttggaaaccatggctttcggacgcaggtgacgtttacgcttggtagcttttttggtcagaatgtgacgcaggttagcgtgcttgtgcttaaaaccacctttaccggtttttttgaagcgctttgcagcaccgcgtacggtcttaatttttggcattttaataacttccacttcgcattgttaataaacgaaacaaaggcgaacaaaccagtgagccgaagcccaccggaatgttacttgatggccttactgtttcttcttcggagcgagcaccatgatcatctggcggccttcgatcttcgttgggaaggattcgactactgccagttcaaccagatcgtctttcacgcgattaagcacttccataccgatctgttggtgggccatctcacgaccgcggaaacgcagcgtgatcttggccttatcgccatcttcgagaaagcgaatcaggctgcggagttttacctgatagtcaccttcatcagtaccagggcggaatttaatttccttaacctggataactttctgcttcttcttctgttccttagaagacttactcttttcataaaggaacttgccgtagtccatgatacgacaaactggcggttcggcgttagggctgatttcaactaaatctactccagcctcttcagccttttcgatagcttctctcagactcacaatacccagctgctcaccttccagaccagttaagcgaacttcctgggcgcgaatctcgccattaatacgattcggacgtgccgtttgaactcgttttccgcctttaataccttattcctccagttgttgaagactgcggctgcgaatctcttgttgcagcttctcgatcacttcatttacgtccatgctgccgaggtctttaccgcgacgggtacgcacggccactttgccggcttcgacttctttgtcgccacagaccaacatatacgggacacgacgtaaagtgtgctcgcggattttaaagccaatcttctcatttctcaagtccgcttttacgcgaatgcccgcattttgtagtttacgcgtcaattcgttaacgtattcagactgagaatcagtaatattcatgaccactacctgcactggcgcaagccaggttgggaagaagccagcgaactcttcggtcaggatgccgatgaagcgctccagcgagccgagaatcgcgcggtgaatcattactggtacctgacgctcgttgttttcgccaacataagaggcgcttaaacgctgcggcagggagaagtccagctgtacagtaccgcactgccatgcacgatcgaggcagtcatacagggtaaattcaattttcgggccgtagaacgccccttcgcccaattgatattcaaatgggatgttgttttcttccagcgccaccgccagatccgcttctgcgcgatcccaggtctcatcgctaccgatacgtttttccgggcgagtagacagcttgacgacgattttctcgaagccaaaggtgctgtacatatcataaaccatacgaatacaggcgttcacttcatcgcgaacctgatcttcagtacagaagatatgcgcatcatcctgagtaaagccacgaacgcgcatcaggccatgcagcgcgcccgacggttcgttacggtggcagctaccgaactcagccatacgcagcggcagatcgcggtaagatttcaacccctggttgaagatctgcacgtgacccgggcagttcatcggcttaatgcagtattcacggttctcggaagaggtggtgaacatcgcatctttgtagttgtcccagtggccggttttttcccacagcacacggtccatcatgaacgggcctttaacttcctgatactgatactctttcagtttcgaacgaacgaaagtttccagttcacggaagatagtccagccatcattgtgccagaacaccatacccggcgcttcttcctgcatatgatacaggtcaagctgtttcccgattttacggtggtcacgcttagcggcttcttccagacgctgcaggtaggcgttcagcgcttttttatctgcccaggcggtgccgtagatacgctgcaacattttattgttgctgtcgccacgccagtacgcgccagcggttttcatcagtttgaagtgatggcagaaacgcatattcggtacgtgcggaccgcggcacatatcgatatattcttcgtgatgatacaagcctggcttgtcatcatggccgatgttttcgtcaagaatagaaactttatagggttcgccgcgcttcacgaaggtttcacgcgcttcgtgccagctgactttcttcttgatgacatcgtagtttttctcggcgagctcgtgcatacgtttttcgagcgcgtcgatgtcttcctgagtcagggtgtggtccagatcgacatcatagtaaaaaccgttgtcgacaaccgggccaatggccattttagtgttcggccacagctgtttgatcgcatgacctaacaggtgagcgcaggagtgacgaatgatctccagaccgtcttcatcttttgcggtgataatagaaagcgtggagtcagtttcaatcgggtcgcaggcgtcaaccagctcaccgtttacacgtccggcgatggtggctttcgccaggcctggaccgatatccagagcgacatccatcgggctaactgcgtggtcgaaatggcgttggctgccatcaggaagcgtaattacaggcattttatgtccttatttgcagtggtgccccgcacgaaagagcacatacaaaacaatataatcataattatcaacgagttgtggctcagctcccgcttcactctgcgaaaatatgagtacgcccgtctatctattgaaccgccctcacctgcagccgctcgttgataacaccgagggttagtgtacacatcattactgcgcgattaaagtcgcaataactaaatggttattcttcttttaaatagcaaggggcgataacaatttgtcgaggcaattcccgcttaaaccacgcggttaattaaccgatcaattacctgaaatgaagagataaataccaccaccgctaaaaagcgaaatgaaaaaatcatccgttatagtgagaattcatatccggcaggaaataacaggaatcaggccggttgcccggcctgaaaattacattttataaccgagcgataaggtagtgcggcggtcggtatgctccggcgccgaggccggcggctgggagttccacgtcaggttataggcgacacgcagcgcaaagtgggcgttgatagccacgtttaatgcgctttccgagttcagcgtcgtatcttcagcgccgaataccgaaaccccttgagtaaatttggcgttatcggtcatctgccatgcccaggtgccggaggcgtaccccagcggctgagtttcgttatcgccatcggtgtattcgtcgtaacgcacgcccggaccaaattcaaaacgcaagctgtgaaccgggccgttgaggatctggcgaccataaccggcagtcagcacgtcgcgctgttgatagccgttgtagcgatcggtcagccagctggcctggccaaatacatagttcatatcggtcaggttataacgactacggccgcccacggcatatttctccgaagagcgttgatcgttagaggacgtgttgctcgcattgccccacagtgaccaggccgtggtatcgccgtaccaggtcaacgtggagtcagcggtcattgaggagcttttcgtgttgccggactgagcgagataacccgcattcacagcaccttcgaaaggttttttggcagtggaagggtcatccatgacggtaaaaacggaatcatcggccagtgcgtttacagacgcaaaaagcccccccgccagcaatgccgctgcgggtactgtcttcaaaagcttcattataactctctaaaatacatatcttcaggacagtacaaatgatgaatggaccagcgatcccttcatttaatttagagtccgtacaacatttaaggagaccaggcaggtcccggaaactttcgcgaggcgcgctgaatgcgagtcctaagaaaggcgcttgattataaaaaagcacgaataacttagcaatcagttgctatttcgttttttgaataagacggttcccaaaacaatctttatttcataaagataaaaacccagacatctttgtaaatccatcgttcgccccgcttcccctcactccatttcagtgccatgcttaaaaaagcagctttattcgtattaaggaggaacaggatgaccaaaatttatacgctcacgctggccccatcactcgatagcgcaacgctgacaccgcaaatataccctgaaggcaagttacgctgtagcgcaccggtattcgaacccggaggcggcgggatcaacgtcgcccgggccattacctttctgggcggtaaagcgacggcgattttcccggttgggggcgccaccggcgagcatcttaccgccctgatggctgatgagcaggtcccggtcgaaacaatagaaacccgcgactggacgcggcagaacttacatgtgcatgtcgatgccagcggcgaacaatatcgctttgtcatgcccggcgcggcgctaaccgaagatgagttccgtcgcctggaagagaaagtactcgcgattgagcccggttctctgctggttatcagcggcagtctgccgcccggaatcagcgtcgagcatctgactcaactggtaaaaaacgcgcagcagcacgggctacgttgcatcatcgacagctccggcgatgcgctggccgccgcgctggatgtcggcaacatcgagctggtcaaaccgaaccagaaagagcttagcgcgctggtacaacgcgacctcagccagcctgacgacgtgcgtaatgccgcgctggaactgatccgctcaggaaaagtacgccgggttgtggtttcgctgggtccgcagggggcgctgggagttgatgccaccggcagcgtacaggtggtgccgccaccgatgaaaagccagagcaccgttggcgcgggtgacagtatggtcggcgcaatgacgctacgtctggcggaacaagcctcgcttgaggatatggtccgctttggcgttgccgccggtagcgccgccacgattaaccacggcacccgcctgtgttcattaaccaacacgcagaaaatctacgattacctttgtggccgctagtctcgacccccttcacccgggtgaagggggtcaattcgctaccatggtctatgctagaaattccatgcataacaacagagtgaaaaatgagcaacgatattaccgcgcacgtgatcaccgttaagttccaggaacaagcgctgactgagattaacgagctcagcaatcatttcattcgcgcaggcttcgtcctgacgctcaacgacgatgatggcaaaacccatgatttaggtaccaacacatttggcctgctgagcgcgcaaagccccgaagacgttcgggcattaagcgcaggtctcgcggaagccgctttaggcaggccggcagagatcgccatcaccacatttagcgaatggttaaaagctcaataagtgcgatcgccatcgtggaagacgtcagttgtgcgttagctcgaactttacggccaggttatacgctaaccttatgatatggtggaaaacatggggagagacagcatgtggcaagctattagcaatttgttaagcgagcagcacactggcggcgctgaaatcgaactgcgcaacgagctacccggaggagagatccatgccgcctggcatttacgttttggcggaaaagattatttcgtcaaatgcgatgaacgcgaactgctccccatttttaccgcggaggcagaccagctggagctgctctcgcgctgtaaaaccgtcagcgttccgcaggtttttgccgtcggcaacgaccgggattacagttttctggtgatggaatatttgccgccgcgaccgctggacgcgcataacgcttttctgcttggtcagcaaatcgcccatttacatcagtggagcgaccagccgcagtttggccttgattttgacaacgatctgtcgacgaccccgcagccgaatgcctggcagcgccgctggtcaacgtttttcgctgaacaacgcattggctggcagctggagctagcggcggaaaaaggactgcacttcggcgatatcgacaacattgtcgaaagtgtacagcagcggctcagcagccatcagccgcagccttctttattacatggcgacttgtggtccgggaactgcgcgctagggcccaatgggccgtatattttcgatccggcatgttattggggcgatcgcgaatgcgatctggcaatgctgcctctgcatccggaacaaccgccgcagatttacgatggctatcagtcggtctcgccgctgcccgctggtttccttgaacggcaaccgatttaccagctatacactttacttaatcgggcaattctgttcggcggtcagcacctggtcaccgcgcaaaaagcgctcgatgaagccctgcaataggcgtaaaaaaaggccctcaaaagggcctttttcatcagcgagcttaatccatttttacgccgtttaagcggaatttgatattcatcgtcaaaccagtgcccggcctgcctgcctcgtagcgccatttgcgcatcgcggttttgacatcacgctcaaacatattggccggcttcgcagagagtatctggatattctccacccgaccatcggcggtgacatcaaatttcacgcgcacgtcaccttcaatacgcagcgcctgcgcacgttgcgggtaagacgggtcgccgcgtttcaacgctttaggaccgctcggcgcggtggtcatcggttttgccgttgccgccgtggtactcggggcagtacgcgcaggcgccgtattgttattctcaaacggcgagaccgggcgcggctcagcgggcttcacctcgcgtttcggctcgacttttttctccggcttaggctttggtttcggcttgggtttgggcttcggctccggtttgtggataaccactggtgcctcttttggcggctcaggcaccacttcaggctccggttccggctccggttcaacaacgggttcaacgaccggctgcgccgcctgcggaggctctaaatccgccggcgccaccatcgtgatttcgattggctgtgaaggcgaaggcttttcaataacctgatgtaccgaggtataaagcaaccccgccacaacggcaccgtggatagccacggacagcagcgttggccacggaaagcggcgaggtaaatcaagggtcattgcgctcatagtcgtttctgttgaaaaatgatgccctgattttaaatgcaaatagcaatcatattcaataagacgtgttatcttgcatcaaattttgcctcgttttgtggaaaaaaaccggcgtgccgtggcatgctaaaggcgtgcgcatcttacattgctgcccataacgctttcacgtcacgtgatttgcctattttttgattaaggagccttgccgtgctttacgtcatctacgcagaagatatcgccgattctctggaaaaacgccaggcggtgcgccctgcccatctggcgcgcctacaactattacatgatgaaggccgtttactgaccgcaggcccgatgcccgcggtggatagcaatgaacctggcgcggcaggatttagcggctcaacggttatcgcagaatttgaatcgctggaagcggcgcagtcctgggccaacgatgacccctatatcgccgctggcgtctatcagcacgtctccgtgaaaccttacaagaaagtattttagttaaacaaattagctatttaatatcagtaagatataccaatcataatatagcgatcattctgtaaaggacacatttaggtacactaagtgcagaatggtcgcccttccttggatcctcgatacgtcttctatactttcagtctgaccactggaggttgatatgtgcggacgcttttcccagtcaatgacccgtgaagattatctttcctgtcttgccgatgaagccaatcgtgacatcgcatatgacccggagccgattgatcgatacaacgtcgcgcccggtaccaaagttttgcttctgagcgaacgcgatgaacaattgcatatcgatcctgtcttctggggttatgcgccagaatggtgggataaaccacctctgattaacgcgcgtgtcgaaacggcggccaccagcagaatgtttaaccctctctggcaacatggccgggcgatctgctttgctgatggttggttcgaatggaagaaagaaggcgacaagaagcagccctgctttatccatcgtgccgatggccagccgatattcatggcagcaatcggaagcacaccatttgaacgcggagatgaagcagaaggctttctgattgtcaccgcggctgcagataaagggctggtagatattcacgaccgccggccgcgtgtactttcaccagaagcagccagggaatggatgagacaggatacaggagggaaagaagccgaagaaatagctgcagacggttccgtgtcagttgaccattttacatggtaccctgtttcccgggccgtgggtaacgttaaaaaccaggggccagaattaatcgaggctattgagcgcctataaattgataacgtccgaaatgtgccagtagcagacattgctttccagcgttcattgtcctaaaagttaatgacccaatgtaatcaggacaatactatgctccttgagagacttaaacgtctcgaatgttctcttcatgataacaagcggaacgatcggaaatggcttgaacatatacttcatgaggaatttcgagagataacgcgatctggcatgttagttgatcgggcagaaacaatagaggcactttctactgaagttgatagaccaatcattcacagtgacgaatttagacttatcatcgttagaaataatttcgcaatattgcattaccggacttttgatccagatggtagtaatgcctctcttcgttcttcatgctgggaaatgagtggaaatggccaatggcaaatggtattccatcagggaactcctgagtcaaggcgtgtctagctccaagttgcatcgtccgctcctcgctcgcagcggaccttcagcttgtataactattccgcttcgtgccaatgaccgacgttatttctttccaaagcgcagtagaacgattcttttatttaaatgatatagagtatgtacgctcacattggttgtcttaaccattcactttgcttgagggaaaaaatcagactcggcggtgcatctttcacatcataaatctcttttatatattgaaacccagttttttttagaaccttctgcgatgccaggtggttagctctcactacggcggatatctcggacagatttaacttacaaaatccatattggacagagtttttcgagaactctgtcgcccagaccttttccccatgcctctgtggcgaaacgataccctaaattattaattactgtatccgcataactacggatacgcagccccccaaagccaatgattttttccgggctatccttcaaagagattgcccagtttccaataccgtgggtttcccagtggttaatccattgagctaaaacagtttgagcatgatgtatgtcaggatagggccctgcggggttaaaggtgttcgtagccgggtcaccataaattctgaaaaggtcatcaaggtcagacttcgttacggggcgaagatatagtcgggtagattgaagttgcaaaacaatttccttactaaagagctcatcagaatagttagataactgtatatagtgaatcacctgacttcgagcaaatcactgtatctaagcttttattccggcacgcttcatcagtcgccagacccggttcactccgcactgctgtccggtatcacgcacttgcgattgacctgccccaagattagatacaaccttcagttagtaatgtcggttggtgacccactccccatatgtgatccattcataatcaggaaaaaccggcttcatgttggctgcatattctgccaaccggcagacttctcagcgaattcggatggcctcatccaacccagtgcagaatggggacgcctctggttatagtgtatgcgccaggcctcgattttgaactgtgcatcctccagagaaatgaaccagttctcgttcatacacccacttgcccagcattttccctgcaaattcagagccgttatcggttttcagcaactgtggtaagggacgtctgagcacaatggcgttcagcatctctgcgacctccgttgagcgcagattctggcccacgcagctccccagacattcgcgtatgtagagatcaatggctgtcagcagacgtaaccgaagcccgtcaaataaggcatcagagacaaagtccatgccccagacatgattcggatacagcccctgaggctggggctgtcggcgctgtgccgatttattccggcgtgagcgtttgagacgcagggacagcccctgctcgctgtagagtcggtaaatgcgtttatgattatcccgcaagccctcccgcctgagcatgacgtgaaccctgcggtagccatagtgaacccgggtttcggtgatctccctgatacggaggcgcaacgcactgtcgtctgctgctacagaacggtagcggaaagagctgcggctaacccgtagcgcaaaacagacctgcctctcactggctccgtagagtgcctgcaggtcccggacccattcgcgcagacgcgccagcgtcagttcttttttgccagcacatcctgcagcatggccttgtcgaggctcagatcggcaaccagcttcttcaacctgagattctcttcctcgagctgccgcgtgtgtttcagctccgaaggagaaatcccgccctatttcttgcgccatgtatagaacgtggcatcggaaatgccctgcttaccgcagacctccggcacggacgtctccagttcagcctgcttcagggcaaaaacaatctgttcttcggtgaatcgtgactttttcatcggcaccacctccgttcagggagtgtagatcatgccggcattctgtttctgaatggtgcaggatttcgggtcagggtcacagccgcagtgttcatgcaacccttcgtaccggtattgttcaacaggtggctaattccgggtttgtttcctattttttaaaccagaaccctttctttaaggcaatgaggtcatgctgaacacgtggatcatcctgattgtggccatcgcggccgaaacctttgcaacaaccatggtcagagcatcagaaggattcacacgcctgcttccttcccttggggtcgtcgccggttatgccgtgtcattttacggactctctcaggtcgttaaggtcatgaatctggggatcgcttacgcgatatgggccggcctgggcatctttcttgtctccattttttcctggtttctcttcggccagaagcttgatcttcccgccattgcagggatgggcttgatactgtcgggggtggtggtcattcagctgttttcctccaccgtcacgcactgatattacctgcaggtactggatatgccgaaacgtatacagattgcagaaaaaaactatcttcctgccctcattatctggcccgtcatttatcttattctggcatttatctctctgaaactggacgatccgcaaaatcgtgtagcgatggtctggtttcctgccggggcagctgtcagcgctttcctttctctgccgcgacgattctggcccgcaatgtatatcgtgctctttgctgcccgcgcagggatggatttgctgatgcgccattcttcggaaacatccctgatactttccctgatttcagtcagtggtgactttacagtggcgctggccgtacagcactacagtcgtggacaggatgattttcgtaaggtgtgtgtctggctaatcagtactcttatcatcagcgcgctggctggtatggcagcagcaggatggctgtcttcgcgtcatcccgtgtcttttgcggataccactgctttgtggtgggcggcaaatgtcagcggcaacatcgtcgccactaccatactgacaggtctgacatgggagccagccaggaaggcaacgggggacgtcgtaaagagcctcgccagcgtgctgttggtcgcggtgattgccatactcattttctcttccccttccggggaagagtcccgggcggggctcatttacggactggcctgcttgccggtcctgttgactgctgtcgtcccggtcatcgccggtgcccaggccggcgcgctggcttttctggcactgagcatcgttgtggtttccttttcatggcaccagacaggccccttttttattaatggcctggatccgggcgaaccgctgcttctcgctcagggatacctgtccggtacggccatcctgactatctttgtccggctgttactgcggttgccggataagctaaacggtccggggcgtaagcagatgcatcacgaagaaaccgcctttcgcatggatatccgaagtggccggatcgactgggatctgcagggaacaccggtgctggcagatacggtggcacacctgcctgacagaaaaatcctgctccagagcgtggatactgctgtcaggcaacagttaacatcacgctgggaacaggcaatccgcggcctgcccgtaggcggatcgttgatattccggcttacattgccgggagatgaacacgtaatgatctgcgagcggggactattctttttgcccggtacaacaggtggattcctcgtcggatactggttacccgccagtggtctggtttccgttatccgtccggaggaccactgactatgctgcagattgcactgcttttatgcggccgacgttttatcggtggcaaccggtaccttcttactgctgcaggtctgatttggggtcttttcggttttctggtactggcggacggtatgctgggagcacgctattttccgctcggactttttggctggtttcttttgtgcgagagtctgttaacgcttgttgcgtcatccggtgccaccggggctaagcgaggaatttatctgtttaaaggtgggattattggagccgtggccctgcttattctgtcaggatattcaggcagtaatctcctcctggctatcatactgggatttatctgtttgttgtccggcgcttttcaggttgctgccgcctgggtggttcgttatccgtactggagacgcgcgctggctggcgggatgtgtcagatcctgtatgcggtattccttttccagccctatcccactcatcatgatggaacggttcctcagttcatcggggcgctgatgctgctcagtgccgttgactgcattctgcttgcttttcggctccgaagtctggccccgggggtgactatttttgatgtccagtctccggacagcacaggatacgcgccgacaaatacagaaccacagcatccctgtcaggaagaagtggcgttggaagcgacagagctccgtgttctggtctggacaccggaaggttctgctacccaggacactctcccccggccagtgatgaatcgctatattgcagcagtggattctgccggggtcatttctaccggacatgccgcgctggagatgcaggatatctatatcagtctttacccggcagtggatatagatcggtccccttcggagttttttcgcacactccgggccgtacgggagaataatgtacccggaaaatttcaggacagttacgcatcagagtccgccgcctggtgtgaagccgacagacaggtttgttttcatactttcaacgcggtatcactccgggcattcactacatactatcgccgccaggaaatatataaccttacctggcgaaattgctccagcagtgtggcatacgcacttgaagccgcgttagatggtgtgctgtgcaaccggagcggctggtcagtttttttacggctcttcttgcagccggagctctggatcgcagcacaactccgccgccgtgccactaccatggcctggacacccgggctggttctggattattcccgcgcattgcacgggctggttcacccggccagactgaactggtttcgcaaaccatgagatgcgacagcgtcaggaaaaggtgctccttccgggcggtagaagaaacatcaccggcttctgactccgcctcccttccgagccctgacagaaaccggtatacctcagggttgtcgggtcgtgccgacaagtggtgtcctatcaagatgcttgtttctgccatcgcaacagacggtactgttaccccagcattgttcatacggaaaaccgatcagggcttccatgacggcacgaacatccgctgtgacatgtgaaatctggccaccagcccggatacgtgccacctcagcaagcaccaccagatgtgccttccggttcagcttcatctgcgcgctgaaataaatccccgcgagagccagtgcaatcacaccgacgcaaaagaccagcgcaatagccattaccgcactttccggctgggtttgcgatttagactggaatccatagaaactcaggatcgctcccatagtaaacacaatcacagagcgcacaagtttaccggagaaggtcatcgtgccggcatagatcccctcgcggcggcgtccggtaaagacttcgtcaacatcagcgagaaaggtatacacagtccagggaatgtaatacaccccgcccgtaccgatcccgaagacaacggtaatcgccagcatcgccgcagtggcatactgttgaggtaggtggaaaaaaaagagcgcggcataacacagtacggaaaaaataacgatacccagcgcaagtatatagggcttgctgaacccatgttttacgcagatagcaataaaaatagctgtggaaaagagctgaagtacggagttcaggctgctcagtccggataccatggtcggatcatactgcaggacaaaaatgataaagtaggtaaagacagaagcaaacagccactctgccccgaagccgcacaaatacatacccagatgtttgcgaaagacacgcagtgaaaaagtcgatctcatctccctcagcaatgccagcattgcatggctgagcgtggtgttttcttcactttccggcgaagcttctgcggccgggcgctcccacgagtaataccagagtgtccccatcgccacacataaaatcaccccatatgtcagggcggtgtaaaaaaatggggtggccgattctttaccgtaaacaagaatgaactggcccggaatgaaagcggcgagaaagttggctactttaccaaaaatagctttaaaaccagtgagtttagatcgtttcgcgaaatctgcggtcatttcagtggcgagtgtttcatagggcaccatgacggaggtgtagatcaactcaaacaacacataggtacaaaggtaataccagaaaccaaatccatcgatccacagcagggggtagaccatcatcagggggatgcccagcagaatgaagaaccggcggcggccaaagcgtttaccgagacgcgttttgccgaaattatctgaaatatatcccatgagcggattgctgatggcatcaataatactggcaaccgaaaaaatagccgaagcctgcagcagtgtcagaccacaaaaggtggtgtaaaagtaaagtaaccagataccggcgatagccagtgccccgctacccagcaagttaccccctccatatgcgagctgatgcctgaaaagaactggcctttctgtcttcataaccctgccctttgttatcaaacaagaaacgaaatagcgttttatattttatgaggctatgttttatagtcgggataaccataaagaaaggtgagtatgttcacattaaaaacattgctaagggcgcttctgaagaaattgtgaccggagttacatttccataatcggtactggacattccccctcgacagaaaagatactttgtttttattattatgaaacgcaatttcataataaaattctcttctgtaatgcaggggctagtaatggctaagggttcaacgattcagttacattttcaccatttcagtgacccgcataccggggctcggataacgcgtctgacaccaccagatgtgatatgtcatcgcaactatttctatcaaaaaagctttacacgtgacggcagcaaactcctgtttgctgctgaatttgacggtcatcgcaactattacctgctggaccggcaaaaacagaccgccgttcaacttacacacggtcgtggtgacaatactttcggcggctttttgtcgcccgacgatcgcagcctgtattacgtgaaaaacgagcgggaattacgtcgtgtcagtctggatgattacagcgaacatacgatctatacggtaccggaggaatgggttggttatggcacctgggtagcaaacagcgaatgtacgcgtctggtcggtatcgaaattgcccgggatgactggacaccgctcaccgactggcaaaaattccggacgttttacctgcgtcgtccgcattgtcgcctgttgcaggtggatctgcataacggttccacgcgggtgatccatgaagcgaacgaatggcttggacatcccctctatcgaccttacgacgacagtacggtggcattctgtcatgagggacctcacgatcttgtggatgcacgcatgtggctggtcaacgaagacgggagtaacgtacgcaaagtgaaaactcatgcgccggaagaaagctgtacccatgagttctgggtaccggatggttccgcactcctctacgtttcataccttaaaggtcattccgagcgttacattcgccgcttctcaccacaaaccggagaagacagcagcctgatgacaatgccggcctgctcacatctgatgagcaatgccgatggcacgctgctggtgggtgatggctcgggtaccccggtggatgtacaggatacctcagggcatgtcatcgaaaacgatccctttctctatctctttgacacccgaacccgccgctatgcgccactggcgacacatcagagttcctggcaggtgctggacggcgaccggcaggttacccatccgcatccctctttttcacccgacgaccgggacgtgttatttacatctgatttcgaaggcctgccggccctttatcttgcacaaataccggatactctggtcagttcacttggtaaggagtaactatgtttatttttagggacgagacttcggagggagatctcggtaacggagtacgcaggcggattctggcgcacagtggttcgctgatggcggtcgaagtacattttgaaaagggtgctatcggggcactccaccggcatattcacgaacaactgacctatgtgctttccgggcgctttgtgttcaccattggcgatgagactcgtgaggtgaaagccggtgacacactctacaaacaaccgaatatcatacacggttgcgagtgtctggaggcaggtatattgctggatacttttacgccacagagagaggattttctgtaagaggcatggtttgacgtggagtcagaggaacctgtaaagagggggagaagccagtgtgtaagtatcccgcataatcgtgccattcataaatgcaaaatgacgaacggcatcgctattctctgcgcaggtcctgcagcagtgttccgtattccgcgtgaatgacgctggaaaattcacgaatgttagccaccggggccgctgtcttgtgcctgtccggtatcacgcacttgcgataaccatagacgcagccagactcaagccagaactgtttgatctgcctggtcagcatctggtctgtctgaagacggcggatcccggcctgagcatctggctgttcattatgagtggaagaatccggaccgtagttctttatccaggcgtaaagactgtgagtggtgatatcgagacgtgttgcaacactggaaacagaatgaccacgatcaacaacctgtttaactgcttcaattttaaactcatcagagtaacgcttaccgctcatgggcacctctctttaagtcatcttcaatgactctgaggtgtctgttaaacccgcggcgattcacggtgcctttaatttttactctcaaaattcagagaaggtgaacagcaaagcatgacgctgccgttttaccaggcacttcctgattgaaagaatccgcatgttgcggcgagattgggcttccagccagcgcgatttacggcgactcacttgtctaagcatgcgccagcgccctacttctgttctactacgcttcattgctactactctacgagtgaaaaagactcctcattataaaccgatgaatctgtctgaccatcgctttcgctgcgtttttatttgccagacggatgatgatgcgtaaactcatggcatcgggctattcaaaaggatttttcatctatgacaaccttttacacggtcgtaaactggctggtcattctggggtactggctgctgattgccggcgttacattacgtattttaatgaaacgccgtgcggtgccgtccgccatggcatggttgctaattatatatatcctgccgctggtgggaattatcgcctatctttcctttggagaattgcatcttggcaaacggcgcgccgagcgcgcgcgcgccatgtggccctctaccgccaaatggctaacggacctgaaaagctgcaagcatatctttgcgcaagaaaatagcccggttgccgaatcgctgttcaaactctgtgaacgtcgccaggggatcgccggcgttaagggtaaccaactgcagttgctaaccgaatccgatgacgtgatgcaggcgctgattcgcgatattcagctctcacgacacaatattgagatggtgttctatatctggcagcccggcggaatggccgatcaggtcgccgagtcgctgatggccgccgcgcgccgcggcgtgcattgtcggctaatgcttgattcagccggcagcgtcgccttcttccgcagcccgtgggcggctatgatgcgtaacgctggtatcgaggtggttgaagcgcttaaagttaatctgatgcgcgtgttcttacgccgcatggatctacgtcagcatcgtaaaatggtgatgatcgacaactatatcgcctacaccggcagtatgaatatggtcgatccgcgctacttcaaacaagattccggcgtcggtcagtgggtcgatctgatggcgcgaatggaaggcccggtggctacggcaatggggattgtctactcctgcgactgggaaattgaaaccggcaagcgaattttacccccgccgccggacgtcaatatcatgccgtttgaagaggctaacgggcataccattcatactattgcttccggccccggcttcccggaagatttgattcatcaggcgttgttaactgcggcttatgcggcgaaagaacatctgatcatgaccaccccctacttcgtccccagtgatgatctgctgcacgccatctgtaccgcagcccagcgcggcgtcgaggtcagtattattatgccgcgcaaaaacgactccctgctggtaggctgggccagccgcgccttcttcactgaactgcttgccgctggcgtgaaaatttaccaattcgaaggcggtctgctacataccaaaagcgtgctggtggatggcgaattgagcctggtcggtaccgttaatctcgatatgcgcagcctgtggcttaatttcgagatcacgctggcgatagacgacgtgggcttcggcggagacctggcggcggtacaggacgattacatctcccgatcgcgcctgctggatgcaaaactgtgggccaaacgtccgctatggcagcggatcgcagagcgactgttttacttcttcagcccgttgctgtaaaacgtgcccatcagatgcttaacgggtagcaatcatggatatggatttaaacaatcgcctgaccgaagacgaaacgctcgaacaggcctacgatatctttcttgagctggcggcagataacctagacccagcggatatcattcttttcaatctgcagtttgaagagcgcggcggcgccgagctgtttgacccggcggaagactggcaagagcatgtcgattacgacctcaatccagatttcttcgccgaagttgtcattggcctggccgataccgatggcggtgagatcaacgatatcttcgctcgcgttctgctgtgccgtgaaaaagatcacaagctgtgccacattctgtggcgtgaataagcattaagctaatgcgcctgtaaaaaagcctgccgacggtaacatcggcaggctttttgttttatacgttattgcggtaattctgttccgcaggcgtggcagaaacgggcgtttttatcatgctcggcgttattgcagtttgggcaaacgcggcgggcgcgtcggttttgcagcgccgtagtcatatgtgtcgttatcagcccggttggaatggcgatgatagaataaccgatgagaattaacaccgaggcgagtatccgccctagcggcgtatgcggcgtaatgtcgccataacccacggtagtaatggtgacgattgcccaatagaccgaagcatttaaggtggtaaacccgtattgcggcccttcaattaaatacatcagcgagccgaaaatcaccatcacaatagcaataaacgagtagaacagaatgagctgatggcgggcgctgacgatagcccgccaaaaaatattcagcgacggcataaaacgcagcagtttaagaatacgcagcgcacggataacccgcatggcccgccaggcaaagacatactcgaggctcatttccggccatagccacatcacatacagcggcagaacggtcgccagatcgataaatccccagaagctgaagatatagcgcagcggattcggccagcttataacgcgtaaaagatattccgcggtgaagaccgcggtgacccccaactccagccagacaaaaatatgccattcatcaagcgacaggtgatactgcgaaccgagcccggactcaacaaaaataatgaccacgctcaacagggcgaataaaccgcaaagcccttcaaaacggcggccggagcgacgagtttgatcgaaaagtaagtggtaaagccgcaaacgggcggcggaaagcgaaactgccacgttaacctcacaataaaaaagggctgacatcagtcagcccaagtgattataacgggtctaccttcaggcaggaaaccgcatggcggaaactgccttccagcaccggacgcgttttggcgcattcgggcccggccaatggacatcgggtgcggaacacacaacccgaaggcggattaatcggcgaaggcaactccccttccagcagttggatggttttattcttctcaagatcaggatccggcaccggtacggccgacatcagcgctttggtataaggatgcagcggattatggtacacctcatcataggtacctaactccaccgcatgacccaaatacatgaccagcacgcggtcggaaatatgttttactaccgccaggtcatgggcaataaaaatcaacgacagccccatctcccgctgcagttgttgtagtaagttcaccacctgcgcctggatggaaacatccagcgccgataccggctcatcgcaaataatcaacttaggctcaaggatcagcgcgcgagcgataccaatgcgctgacactggccgccggagaattcgtgcggatagcggttaatcaggttcggcagcagtccgaccttcatcatcatcgccttcacgcgatcgcgcacttcctgacgtggcatcttcgggtgataggttcgcagcggttcagcgatgatttcgccaatggtcatacgcggattcagcgatgctaaaggatcctggaagatcatctggatatcgctgcgcacgtcgcgccactcttccggcttcatgcctaacagatcttttccaagccaggccactttaccgtcggtagctttcaccaggccgatgatggcgcgggcgaaggtcgatttaccgcagccggattcaccaaccaccccgagcgtttcgccttcatacaggcgcagcgtaacgccatccaccgctttgagcgtttttgacggctgccagaaccattgcttaccatctttaatatcaaaatgtactttcaggtcagcaatttcgagcaacacttttctttgttcgatcacggcgttcatagcagatcccctaccggtttaaagcaggcgcgcaggcgacctggcgcaaacgactccagaggcggagcgttattacagatttccatagcatgcggacagcgcggctggaacggacatcctttcggcagacgcagcaggttcggcgggttgcctggaatcgtcagcaaggaatcgccttcgccatcgagacgcggtaccgcattgagtaaaccgatcgagtacgggtgcgacggttggtagaacacatcgcgcgcctgaccgtattccatggtacgcccggcatacatcaccagtaccttatcgcagatccccgccaccacgccgaggtcgtgggtaatcataataatcgcggtgttaaactcgcgcttcagctcgttaagcagggtcatgatctgtgcctgcacggtgacgtccaacgcggtggtcggttcatcggcaatcagcagttttggccgacataacagcgccatggcgatcatcacgcgctggcgcatcccgccggagaactcgtgcgggaacatcttcatgcgcttacgcgcttccggcatcttcaccgcatcgagcatccttaccgactcttcaaaagccgcggctttgctcagccctttatgcagcatcagcacttccatcaactgctcgccgacccgcatataagggttcaacgaggtcatcgggtcctggaaaatcatagaaatctgttcggcacgcagcttattcagatcgcgctcgggcaaattaaggatttcgcgaccgttaaaagtggcggaaccgctaatatggccattcgcggccaaaagccccattagcgcaaacgccgtttgcgatttaccggaacctgactcaccgacgatgcctaaggtttcgccggccctcaggttaaaattcagatcgttaaccgcggtgacatcgccgtctggcgttttaaacgtcacccgaagatccttcacatccagcagcagaccgctttgctgcgcggcctgcggcgctttagtcatttcaattgtgctcatgacggcgctccttagcggtctttcgggtcgagggcatcacgcaggccatcgccgataaagttaaaacaaaacagcgttaccaccaggaacccggcagggaacagcaacagccacggcgatacctccattgagttggcgccatcactgagtaatgcgccccaactgcttagcggctcctgggtcccaaggccgaggaagctcaggaaggattcgaacagaatcatgctaggtaccaacagtgatgcgtaaaccacaactacacccagcacgttcggcacgatatgacgaataacgatattcgcggtagagaccccgccgacctgcgcggcttcaatgaactctttacgtttcagactcagggtctggccgcgtacgatacgcgccatatccagccacgacaccatcccgatcgccacaaagatcagcaggatgttctggccaaagaaggtgaccagcaggatcacgaagaacataaacgggaaggagttgaggatttccagtaaacgcatcatcaccgagtccactttgccgccgagatagccggaaagcgaaccatagagggtaccgaggatcaccgccaccagcgccgcggcaacaccaaccatcagcgatatgcgcccgccaatcgccacgcgcaccagcaggtcgcggccggatgaatcggtaccaaaatagtgaccagactccatatccggagcgttggacatcatcccccagtcggtatcgaaataggagaactgcgacagcattggagcgatagtcacaaacagtgcaataatcaccagcacaatcaggctggccaccgccgcgcggttatgcataaagcgacgacgcgcatcctgccacaggctacggccctcaacttccagcttctcactgaagtgctccagcgcctcgctgtttttcttacttaacatcatggcgaactccggcttcagtagcgaattttcggatcgataacggcgtacagtacgtcgacgatcgcgttaaacagaatggtcagcgcgccgaccagaatcgtcaggctgagcaccagcgagtagtcgcggttaagtgccccgttgacgaataactggccaatacccggcaggccgtaaatcgtttcgataaccattgagccggtgataatgccgacgaatgccggccccatataggaaagcaccggcagcaacgcaggcttcagcgcgtggcggaagataattcggcgcatcggcaggcctttcgcccgtgcggtacggatgaagttggagtgcaaaacttcaatcatcgatccacgggtgatacgggcgatacttgcaatatatgccagcgataacgccaccatcggcaggatcataaatttcagcgccccgccgttccaaccgccgccaggcagccaatgcaacgtgatggcgaaaatcatcaccaatagcggcgccaccacaaaactcggtatgacgacgccggtcattgccacccccatcaccgcgtagtcccatttggtattttgttttaacgcggcaataaccccggcgctgacgcccaggattaccgctaataaaaaggcggcaaggcccaatttggcggaaaccgggaagcttgatgccaccagatcgttcaccgaataatctttatatttaaaggaaggaccaaaatcaccgtgcgccagctgcttcagataattgaagtactgggtcatgatggggtcgtttaaatgatatttcgcttcaatgttcgccatgacttccggcggcagcgtacgttcaccggtaaaaggactgcccggcgcgagacgcatcatgaagaaagagatagtaataaggatgaatagcgtcggaatcgcttccagacagcgacgtaatatgaattttaacattgcccgtaccttctggcctgtgcctatcgagtgcgatgaattcagacacggtggggcaagctctgcctgccccacgtcttgccattaatgtttgataatataaaggttcttcacgtaaatattatccaacgggtctttaccggtataaccgccaacccacggtttaaccaggcgcgcgttcacatagtagtaaaccggaacaatcgcggaatctttatccaactgttgctctgactgcgcgtacagctctgcgcgtttcgcttcatcggtgacctgcagggtatcgccgatgatcttatcaaatgccgggctcttataatgcgccgtgttgttagaactgtcgctgagcatggtgttcaggaacgatgtcggctcattgtaatcagcacaccagccggcgcgggcgacgtcaaaggtgccttgatggcggctgtcgaggaaggttttccactcctgattttccagcttaacgttagcgccaaggtttttcttccagatggacgccacggcaatagccagttttttatgtaagtcggaagtgttatacagcaggttaaaggtcagcggcttatcagcggtataaccggcttccgccagtaattttttcgcttcttcattacgcttttcctgagaccatttgaaccactcaggttcaacgagtttcatgccgtcggtgtatggcggggtgtaactgtaagccggcagatcgccctggtttttcactttattgacgataatatcgcgatccagcgccagcttaagcgcggtacggacgcgtacgtcggtaaatggcgctttctggttattgatttcgtaataataagtacacagataaggatcgacgtgaacttctttcgggatctcttttttcagcttctggaacagttcaatcggcatgttgttataggtcatgtcgatttcgccgctgcggtagcggttcacatcggtaacttcagaagaaattggcaggtaagttacctggttaataaccgttttagcgttgtcccagtaattcgtattacgctcgagcacaatacgttcgttcaccacccaatcttttagtttataggcgccattggtgacgatattcgccggctgagtccatttttcaccatatttttcgatggcggcttttggtactggggaaacggatggatggacaaggagtttatagaaataagggaccggctcgctcagggtgacttcaaaggttttgtcgtcgatcgctttgacgccgagatcggttgctggttttttgccggcaataatctcatcgacgttggcgacatggccgtactggagatagctggcgtacggtgatgctgttttcgggtcggccagacgctgccagctataaacgaaatcttgcgcggtaaccggcgagccatcagaccatttggcatctttgcgaatatggaaagtccagactttaaaatctttgttatcccacgattcggcaacgcccggaacaggatggccgttaagatcgccaatcactaacccttcaaacagatcgcggttaacgttggactccggtacaccttcaattttatgcggatccagagattgcacctctgccccgttattacgcaccagcgtttgtttatccgccagttgcaccccggcaggaacatccgctgccatagcaacatttgcggtgatgagcgcagataaaattcccgccgctaccagactttttttagtgatgatggtcatgtgttgttactccactcattataattactggttatttaaccagcctgttatttttcccttatagggattctgtacagtgcaggagtctttgccgctgtcagattttactgcttgctatcaccgacttatttattacgaccgctcaaacggcagccttgacgtcgattctttaccccctgtccagaggggaatgtcggcacaacgagtcatttaataataattctcatttgtgcatattagttagttagcgatcaggccggaaagtaccaaaacgatttcttgtccgccaatgcaatttgcaaatatgttaccggattctcttttattgttttttttaccgtgcttatcgtaagacttataacgccaaaaaagaaaaaacattgtttttaatcagcaagataggaccaccctgtcgttttgcggcccggcgctgcgcgcgaagttgcttttttgtacaaaaatttaacagttgtctattttttagcacattaatctgctgtctcaatgaaattactaatatcatttcaatgatccgacagcaagcgccagagaatggtgtgatgaaaataacagtgatgacaggagaaagacagtacggcgagatagaataaaatcaactaaccatatgataaatataaaattaaatcatcattagcaaaagttatcgtttgtcttttttattagtgccaggaataacttttgctaataatctttcaaacgcgaggcccaaccccgcgcctgatacaccggctatgctgtcaatccaggaaacaacgctttaatcccggtaacaataaactcgatgcctaaagccatcagtaacagacccatgatacgtgtaatgacgttaataccggtctgccccagcaatctgactaaccatggcgccatgcggaaaattccccaacaacaggcggcaaacaacgcaatagcgattgaaaaaccaatcagatgggcaatcgagtgataacgcgtgccccacacgatcgtggaactaatagcccccggccccgccattaaaggtaatgccaacggtacgacaccgatgctttcacgaatggccgtctccgacttctcttgtttattttgtttatcttcgccgagtttgccgctgatcatcgacatggcgatcgtcaccaccaggatcccgccggcaatacggaaggaatcaattgagatgccgaaaatttgtaagatgccatcgccaagaaagagcgaggtaagcaggatgatacccaccgacaggttagccgtcagattcgtcttattacgtaccagcgccgtctggtaactggtcatactaatgaaaaccggaatgatgccaaccggattgaccagcgcgaacaggccgataaaaaatttaaaataaatagcgaaatcaaacaacggtagggtcacagtgaactccgcagcaccattaaaaaaggctgttgacagtatcggtacaaaataattgcgcagaagatacccttttcatcgccacaattcatctcaaatatgcagccggggtttattgattttatttgttatatatttgtttcgcgcatgcactttattcattaaatatgcatatcttatcattaaccttgacttgattggttaattattgacctgctgaaaggtatcagcatcgccaaatattgatccaaatcacgtaattaatactcagaagtgagtaatcttggctacatcaacagagtgaaaggccgaagtacctgagtgcgtagtgagacaaagcttttttagtaaatcagtgggttcaaagcgttagaaatctttacgttaacatttacatgcaagctgttaacagcctgtctataatgtcgaatcgagctactgttttactaaaaaagtttaacattatcaggagagcattatggctgttactaatgtcgctgaacttaacgcacttgtagagcacgtaaaaaaagcccagcgtgaatatgccagtttcactcaagaacaagttgataagatcttccgtgctgccgctctggccgctgcagatgctcgaatccctctcgctaaaatggctgttgccgaatccggcatgggtattattgaagataaagtgatcaaaaaccacttcgcttccgaatatatctacaacgcctataaagatgaaaagacctgtggcgtcctgtctgaagacgacactttcggtaccatcaccattgctgagccaatcggtattatttgcggtatcgtcccgactaccaacccgacttctactgctatcttcaaatcgctgatcagcctgaagacgcgtaacgccatcatcttctctccgcacccacgtgctaaagacgcgactaacaaagcggcggacatcgtattgcaggcagcgattgccgcaggcgcgccgaaagatctgatcggttggatcgaccagccttccgtagaactgtctaacgcactgatgcatcatcctgacatcaacctgatcctcgccaccggcggcccaggtatggttaaggccgcttatagctccggtaaaccagctatcggcgttggcgcgggcaacacgccggttgttattgatgaaacggctgatatcaaacgcgctgtggcgtccgtactgatgtcgaaaaccttcgataacggcgttatctgtgcttctgaacaatccgtggtggttgtcgactccgtctacgacgccgtccgcgagcgttttgccagccacggcggctacctgctgcagggtaaagagttgaaagccgttcaggacatcatcctgaaaaatggcgcgctgaatgcggcgatcgttggtcaaccagcggcaaaaatcgctgaactggcaggcttcaccgtgccagccaccactaagattctgatcggcgaagttaccgacgttgacgaaagcgaaccgttcgctcacgaaaaactgtctccgacgctggcaatgtaccgggcgaaagatttcgaagacgcggtcaataaagcagaaaaactggtcgccatgggcggtatcggtcacacctcttgcctgtacaccgaccaggacaaccagccggctcgcgtggcctacttcggccagatgatgaaaaccgcgcgtatcctgatcaacaccccggcctcccagggtggtatcggcgacctgtataacttcaaactcgcaccttccctgactctgggttgtggttcctggggtggtaactccatctctgaaaacgttggtccgaaacacctgatcaacaagaaaaccgttgctaagcgagctgaaaacatgttgtggcataaacttccgaaatctatctacttccgtcgtggctcactgccaatcgcactggatgaagtgattactgatggtcacaaacgcgcgctgattgtgactgaccgcttcctgttcaacaacggttacgcggaccagatcacttccgtactgaaagcggctggcgtagaaaccgaagtgttctttgaagttgaagctgacccaacgctgactatcgtgcgtaaaggcgcggatctggccaactccttcaaaccagacgtaatcatcgccctgggcggcggttccccgatggatgcggcaaaaatcatgtgggtcatgtacgagcacccggaaacccacttcgaagaactggcgctgcgctttatggatatccgtaaacgtatctacaagttcccgaaaatgggcgtcaaagccaagatggttgccattaccaccacctccggtaccggttctgaagttaccccgttcgccgtggtaaccgacgatgcaactggacagaaatatccgctggccgactacgctctgactccggatatggcgattgtcgatgccaacctggtcatggatatgccgaagtctctctgtgccttcggtggtctggatgccgtgactcacgctctggaagcttacgtctccgtactggcttctgagttctccgatggtcaggctctgcaggcgctgaaactgctgaaagagtatctgccggcctcttaccatgaaggttctaagaacccggtagcccgtgaacgtgtgcacagcgccgccactatcgccggtatcgcgtttgctaacgccttcctcggcgtgtgccactcaatggcgcacaaactgggctcgcagttccacattcctcacggtctggcaaacgccctgctgatcagcaacgttatccgctataacgcgaatgacaacccgaccaagcagaccgcattcagccagtatgaccgtccgcaggcgcgccgtcgctacgctgagatcgcagaccacctgggtctgagcgctccgggcgaccgcactgcggcgaaaatcgagaaactgctggcatggctggaaagcctcaaagctgaactgggtattccgaaatctattcgcgaagccggcgttcaggaagctgatttcctggctcacgtcgataagctgtctgaagacgccttcgatgaccagtgcaccggcgctaacccgcgctacccgctgatcgccgagctgaaacagattctgctggatacctactacggtcgtgactttgtagaaggtgaagcggcggctgtgaaaaaagaagcggctccggccaaagctgagaaaaaagcgaaaaaatccgcttaattcgcagaattgaaatgaacgaagccccatctattgatggggctttttttatattcgtactttattagagttacatccaggagtagtgaatgcaataaatctggtgaagtcggaataaaggaaccgattccataaaagacaacaggcgccatttagacgcctgaaggtaatgaaattacagcattattcgccgtgacgcagcttactttgcacctgagttaatgaaccggtgcttaacgcctctttataatgcttacggcatacggaaacgtaccgctcattaccgccaatcactacctgttctccttcattgtatggccgcccttcctgatcaagacgtaacaccatgcttgccttacggccacagaagcaaatcgtttttaactcaaccagtttatccgaccatgctaacaaatactggctaccgctgaataactcaccgcggaaatctgtacgcaagccgtagcacaatacagggatatccagctcatccacgacttctgagagctcatgaacctgttcacgggtcaggaactggctttcgtccaccagtacgcaatggatgggctggcgggcatgttctgacgctatatcggcatataacgacgtctgaggattatacagccgcgctggtgaagaaagcccgattcgtgagctcactttgccagaaccaaaacggtcgtcaatttcagcggtataaacgacggtacgcatccctcgttcctggtaattgtacgacgactgcaacagcgcagtagacttacctgcattcattgcagaatagtaaaaataaagttgtgccatcggctgcgtaaccccaatcaatgtgttttaccgcgcaattgtatcatatattactgagcctaccgtgctttcacggcggtattgctgctggtttaatgacaatgctttacaacaaatgaaacggccagcgaaggaatagcgttcagacatcaccgtcaccacggtagcagatacaaatcattgtcgttttgtgcttaaaccgccattctccagacaactataatgggttttggtcgccaatttatattaaacatcaccataactaatgcgctaaaactgaagtgtgatatttatccacgtgaagtataaatttactctcgaaacgcaggaaaatcatcctgactcatggttttagcgtcagtgcgtatgcttcagctataagcgagaagatgtgaagtcgcgcgaaaatttaacttaaattatttaatcaaccagacaaataacaagtaattttgaattccttacattctcccctattgcacatctgattttatcgctctattattagttcaacaaaccaccccacaatataagtttgagattactacaatgagcgaagcacttaaaattttgaacaacatccgtactcttcgtgcgcaggcaagagaatgcacccttgaaacgcttgaagagatgctggaaaaattagaagttgtcgttaacgaacgtcgtgaagaagaaagcgctgctgctgctgaaattgaagagcgcactcgtaaactgcaacagtaccgcgaaatgctgatcgctgacggtattgatccgaatgaactgctgagcactatggcagcagttaaagcaggcaccaaaactaaacgtgctgcgcgtccggcaaaatacagctacgttgatgaaaacggcgaaactaaaacctggactggccagggtcgtactccggcagtcatcaagaaagcaatggacgagcaaggtaaaacactggacgatttcctgctctaattcgctttatgcttgataaaaaaatcccgcttcggcgggattttttttatcgttacacgctgaaagtatcaggcataaaaaaaccggttcgctatcaggcgaaccggtttctcgggtggtgaatattacttcgcgaccgcttgcgcaagccaggctttaaagtcttcgcccagagttttatggcgaacgccatactctacgaaggcctgcatatagccgagcttattaccgcagtcatggcttttgcctttcatgtggtaagcttcaacggtttctttctcgatcagcatatcgatagcatcagtcagctgaatttcatcaccggctcccggaggggttttcgccagcagcggccaaatatcggcgctcagcacataacgaccgactaccgccagattagacggcgcgacgtctgcttttggtttctcaacaacgccaaccatcggcacgctttcgccaggctgcaggctttcgcctttgcagtcaacaacaccataagcggtgacgtcttcaaccggctcaaccatgatctggctggcgcccgtttcgtcaaagcgagcaatcatctccgccaggttatcacgggtcagatcggactcatattcgtccagaatcacgtcgggcagaataaccgcaaccggctcatcgccgacaaccggatgcgcgcacagcaccgcgtggcccagacctttagccagcccctgacgtacctgcataatggtgacgtgcggcggacagatagactgaacttcttccagaagctgacgttttacacgtttttccagcatcgcttcgagttcgaagctggtatcgaaatggttttcaatagaatttttcgaagagtgtgtcaccagaacaatttcagtaatcccagcggcgatacattcgttaacaacatattggattaatggtttatctaccagtggcagcatttctttcggaatagccttggtggcgggtagcatccttgtgcctaatcccgctaccgggataacagcttttcttactttagaattaagggcagccattgaaatctcctggactgttcgttttttgaacttaatcgtcaataaataacgcatcgagtatatcagtctgatcagttaaacctggtctgaaaaggtatggataccctcgaattaggacttttacgcataaaacgcagtgatagtaccaccggaaatgtaggcccggtaatcccacctactaaaaatagagcgaatagttcaatctgcagacaacatcaagcgtaaacgtccccctgctccccaaatttggcactgccaggatgcgcagcgctggctaatttggttgaggtatgcgttgcccaacgttcctaatggaacgccgttactaatttgaattttatgctctccggtattcaacgtaccgttaagaccggcagaaaccagaatcaaattttttaatccgctgtgataataaccaaccagcaatgggaattgacccggtaaattggcctggcgcagtaattggttaacttgttttaacaatgcgcccatttccggcaggcgctgtccctgatgagcaagttgttcttgcagcaaaccattaaacaaagcgcgtaataataatgccgccagaacgccattatcgccagcgcgggtgacatccaggcaataaaacgccagatcgttttctgataacggcgcaatatccagcaccaaccccggcttatccgctgagataagctgacgataattgatacgacaatgggaaatctcctgctgcaccggcggctgaagttcctgtaataaccttgacgccgccaggggatcgctaactaacgcgtcccagtcttcaaataatctctcttcctcttcaactcgtgaactaaacattgtcgggtagagacatgcatacaccgtttcacgcaggcgattaaaatcttttaccggcttcagtaagacatcctgcacgccaagacgtaatgctttagcaatatccgccatgttttcggtcgctgaaatcatcagaatcgggagctgttcaccctggttgcgaacctgctcaaccagttcaaggccgttcatcctcggcatcgagatatcgcaaatcatcagatccggtttcgaaatcgcgatttgctgtagcgcttcaatgccgtcttccgcctggcgggtagtcgcccccagggaagttagccagctatcaaggagagagcggaaaacgggttcgtcttcaactatcagaatctgttttcccgccaatggctgcgtcatgttctctcccctggctgacgataattaaatagtggcacgctattcacgctatcgcctgtcagaatttacttaagtgttggacaagtgcgctacgcggaagtgcgcaccaagggtaataattcatccatttttttctcaacggccagctgtcctgcggccatcgcttcgccagcacgatgaaaatcgagagtggagatttgcggacaaaacggctggagcaggatatccggcggatcgcctgccatacgattacgtttcaggcgattttccagcacctgtatcgaggttgacataatctccatcgccgtgggggttattgtcgcacggcgagaactcattctccccaaccgggatcgcagacgggaatgccaactgagctcctctatcggctccggacgaggcgactctattgataataaatcctgttgcataagatgggcgtcatgctggagatcgacggcaatcacaatatccgcccccaaagctcgcgtcagtgagaccgggaccggattaaccaccgcgccatccaccagccagtagccgttatgcattaccggcgacatcaggccaggcatactacaagaagcgcggaccgccatgtgcagatcgccttccgtaaaccataattcgcgcccggtactcagattagtcgccacggcggcaaaacggcgttcgcacgcttcaatttgcgcgacgggcataatttgccggtattgattgaacacccgctcgccgcgtaacagtccgccgcgccgccaggagagatccatcaatcgcagcacgtcccagttgctaaaggagctaacccacttttccagcgcagggaggcgattgcaggcgtaggccgcaccgactaaggcaccaatcgaacatcccgctaccacatcgacatcaactcccgcccgatgcagcgctttgatcacgccgatatgcgaccaaccgcgcgcggcgccagcccctagcgctaaaccaatctttagctttctcattagtacagatacatatccttccactccgagcatgacatcagcgccatcactcagttaacataatgcactttggcgctctggcgccgtcattcttttcctggaggcgattttgtcgcaattatgcccctgtggcagcgctctggagtatagctcatgttgccagcgatatctgactggcggtcagcttgcgccgagcccgtcacagctgatgcgttcccgctatagcgcattcgtgatgaaagatgtcgattatttaatcaaaacctggcatccacactgtgaggcgccacgctttcgcgccgatatcgaaaaaggctttgccaatacgcagtggcttggtttaaccgttttcgcaaccgataacggccgtagttccgatgaaggctttgtcagctttatcgcgcgctttactgaagataaccgtcccggcgcgattattgaacgttccagattcttaaaagaaaacggacagtggtactatattgacggcacccgaccattaattggtcgtaatgacccctgcccttgcggctcaggtaaaaaatttaaaaaatgctgcggccagtaaggcccggcatcagcaattgcaaacacaacaggattttccccgcgatgcattcattacaacgtaaagtactacgcaccatttgccctgatcagaaaggcctcatcgcgcgtatcacgaatatttgttacaaacacgagctgaacattgtacagaacaatgagtttgtcgatcatcgtaccgccgcttctttatgcgtaccgagctcgaaggtatctttaatgacgccaccctgctcgccgatctcgatagcgcgctgccggaaggctcaatccggaactcatcccgcgggccgtcgccgagtggtgattctggtcaccaaagaagctcactgtctcggcgatctgctgatgaaagccaactatggcggtctggatgtcgacatcgccgcggttatcggcaaccatgaaacgctgcgcacgctggtagaacgttttgatattccttttgagctggtgagccatgaaggattgagccgcgaagagcacgaccagcggatgggtgatgcgatagccgcccacgatccggattacgtggtactggcaaaatacatgcgcgtgcttaccccggagtttgtcgcccgcttcccgaacaaaatcattaatatccaccactcattcctgcccgcgtttatcggcgcgcgtccgtatcatcaggcctatgagcgcggcgtgaagatcattggcgccaccgcccactacgtgaatgataatctggatgaaggcccaatcatcatgcaggacgtgattcatgtcgatcatacctataccgccgaagatatgatgcgcgcgggccgcgacgtggaaaaaaacgtcttaagccgtgcgctgtatcaggtgctggcgcaacgcgtctttgtttacggtaatcggacgattattctttaatcgacagcgaaatgaattggttagctttgcggcgttacgcgtaaaaatcaggcaaccagtttaattttgtcaaaggaatgctttacaggggcgcgtcatttggtatgatgcgccccgcttcccgagaagggagcaggccagtaaaaagcattaccccgtggtggggttcccgagcggccaaagggagcagactgtaaatctgccgtcatcgacttcgaaggttcgaatccttcccccaccaccattcattttgctgaatagcctacaatttgattttacccctggtggggttcccgagcggccaaagggagcagactgtaaatctgccgtcatcgacttcgaaggttcgaatccttcccccaccaccatctcctcatgtcatgcccagcttaatctacctgcgatattctatattctgccctacggggaaggatgagaagcttcgactaaggttcgactcgagcgtcagcgagagaacgttgccgcaggcaacggcccgaagggcgaggcgctttagcgccgagtaatccttcccccaccaccatctcctcatgtcatgttcagcttaatctacctgcgatattctatattctgccctacggggaaggatgagaagcttcgactaaggttcgactcgagcgtcagcgagagaacgttgccgcaggcaacggcccgaagggcgaggcgctttagcgccgagtaatccttcccccaccaccatctcctcatgtcatgttcagcttaatctacctgcgatattctatattctgccctacggggaaggatgagaagcttcgactaaggttcgactcgagcgtcagcgagagaacgttgccgcaggcaacggcccgaagggcgaggcgctttagcgccgagtaatccttcccccaccaccatctcctcatgtcatgctcagcttaatctacctgcgatattctatgttctgccctacggggaaggatgagaagcttcgactaaggttcgactcgagcgtcagtgagagaacgttgccgcaggcaacggcccgaagggcgaggcgctttagcgccgagtaatccttcccccactactgttgcattctcttcagccacctgcactgctatctcctcgctcgcgcttcgcttagcgaggctacaggtggtgccgtttggtagcccggacaggtgcgcagcaccgcctccgggaaaattcacagcgggggcaatcgtctttttaccggtgaactcttcaccaccgacgtattgcactgcgcatactctgcgagaccatccagtatcgtatccagctgcgcaatatcacggaccacaagacgcataacaaaacaatcctctccggtgaccttgtcactttcgatacactccggcatagcctggatatatttatccactttttgcagcaatcccggtagcggtctcactcgtactaatgcctgcagactatatcccagcgccgccagattcacccgcgcgccataaccctcaataacccctttttcctcaaggcgttttacccgctcggcggtactcggcgaggtcaatcccacctgcgcgctcaataccttgagcgaaactctggcatcttgtgtcaggcaggtcagaatcgcccggtctatttcatcaattacgtattccatttatttcacctaattaataaaggcattcatctgtttttaccttatttcagatatatcaagctgtcaggcttttcacgacaataatggaaaacttctggaggtgaaatatgcagctttctcgtggtgtctggcagatgagcctggcgatgatcatttccggctcgattggcgcattcgtgctgctctcagggttgccggtaatcgacgtggttttctggcgctgtcttatcggcgcggtcacattattgctgtttattttgttaagccggcaacccttcagccgcctgacgcgcctcactctggcgctggcaatccttggcggcgtcgcgctggtgatcaactggctgctgctgtttgccgcctactcacgcgtttctatcgggatggccaccgtggtctacaacacccagccctttatgctggtattactgagcatgatactaggtgaaagagtaagcgcggtaaaatggggatggttactgctggccttcggcggcgtggtgattctgctatcgagcgaactaactcccacccacggcgacaatctcgttactggcattgcactggcgttatgcgcggcgtttttttatgccctgaccgccattatcgcccgcaagctgcagtcgctaccggcgcagcatatcgcttttattcaggttatcgtcggtacggtaatgcttttgccgctggttcatgcccccgagtttaacggccattttccctggcgctatttgctgatcctcggcatcgtccataccgggattatgtatcaacttttatatagtgcaattcaaaagctgccgacgccggtcactggttcgctctcgtttatctatccgctgatggctatcgtggttgactatctggttttccatcatgcgctcacgccgctgcagttggctggaggggtgctgattttgtttgctgcggcgggcaacaaccttggctggggcgaaaaaaaccccgccatggcggggtaagtcagccgtcgcgaatgaactagcgacgcgcgcgcacaatctggtatttgcgcgtcaggtactcgaccggcgcgctccagatgtgaaccaggcgcgagaacgggaacagcaggaacagcgtcatccccagcaccaggtgaactcggaagacaaaagctacgccatcgagatgctgcgaagctccgccgtggaaggtcaccaccgactgcgcccagccgaccagtttcatcatttcgctaccgtccatatgctgggcggagaatggaatggtcagcagacccagcgcgcattgcaccatcagcaacgagaggatcaggatatccgctgtggtggtggtagcacgaacgcgcgggctcagcagacggcgcttgagcagcagtaaaccgccgaccaacgtcatcacgccgcacgcgccgccggcaaacatcgccattttctgcttcacgtcgatcggcaggaaggactcatacatccagtgcggggtcagcatgccgaggaagtgaccggcaaaaatacccaggatcccgatatggaacaggtttgacgccaggttcatccctttacgatccagcatctgactggaggcggcgcgccaggtgtactggccgtagtcgtagcgcagccagctgccaataaggaacactgaacccgcaatgtacggatagatgtcaaagaagaacatattcaggaagtgcattagtgctgtcctccgttagagatattcaaatattgcggggccacggctccggcaaaacggcgctggtgagcggagatgtccgactcgccgcagccctggtcggcaaagaatttgacctgctcttcttcccagacggcatccagcgcctgcggtgtatcgtcgcgggcctcgtcggcaatcttctccgccactttctggctatcgacctgagtattggcaagcttcaacagcagctcgaacaacaccgcatagcggctctcgcgctgttgcagacgcgcgctgagcaggccaaggattggcgcaacgtcccgcaggccgccaagcgcttcctcttccggcaactgcgccagatactcaaggtacagcggcaggtgatccggcagctcatggctatccagcagcagaccgtggcgctcgtactgcgccatcaggtcgaccatcgcctgcccgcgatcgcgggactcgccgtgaacatgttcaaacagcagcagcgaggtggcgcggccgcggtcaaacagctcgctatacgccgattgggcgtccagcggatcctgagccactaaatcgcgcaggaaaacgcccagcgcctgggcatcttctttggcgagtttttccgatgacgcgagagcctcgaacatctcctgctgatgctgccataaggcagcgtcagggtattcgagcagacgcgacacaatcacgagttcaatcatgcgtgcggctccgttttgctggtaacgtcaatggcgtcaatgcgacggctgttaaacaggttgaattcgctgtcagaaccgtggcaaccatcgccgaaggtaaagccgcaaccgctcttctccgggaaagcatcgcgggcctgttcgcgatggctgctcggcaccacgaaacgatcttcgtagttggcgatggccagataacggtacatctcctgcgcctgcgcttcgctcagcccaacctcttccagcgcgcgggtatcgacgacgccgtcgacggtttccgcacgtttgaagtggcgcatcgccagcatacgtttcagcgctagcagtaccggctgggtatcacccgcggtcagcaggttcgccagatactggactggaatacgcaggctttctacatccggcaggatcccgttgctacccagttcgcccgcatcggcggcggactgaatcggcgacagcggcggcacgtaccagaccattggcaaggtgcgatattccgggtgcagcggcagcgccagcttccagtccatcgccattttgtaaaccggcgactgctgcgcggcttcaattacgccctgcggtacgccatcttttaacgcctgttcaatcacttttggatcgttaggatcgaggaagacgtccagctggcgctgatacagatctttctcgttctcggtgctggctgcgttttcaatcgcgtccgcgtcgtagagcaggacaccgagatagcgaatacgtcctacacaggtttcggagcacaccgtcggcatcccggattcaatacgcgggtagcagaagatgcatttctcggatttcccgctcttccagttgaaatagatcttcttgtacgggcagccggtgatgcacatacgccagccgcggcacttatcctggtcgatcaggacaataccgtcttcttcacgcttatagatggcaccgctcgggcaggtcgcgacgcacgccgggttcaggcagtgctcgcataagcgcggcagatacatcatgaaggtgttttcgaactggccgtacatcgccttctgcatgttttcaaagttctggtctttggcgcgtttttcaaactcgccgccgaggatctcttcccagttcgggccgctggtaattttgtccatccgctggccggtaatcagcgaacgcggacgagcgatcggctgatgcttgctttccggcgcgttatgcagattctggtagtcaaaatcaaacggctcgtagtaatcatcgattcccggcagatgcgggttggcgaagattttacccagcagcatcgcgcggttgcccatgcgcggctgcagtttaccgttgattttacggatccagccgcctttccatttttcctggttttcccagtcgttcgggaaaccgacgcccggcttactttctacgttgttaaaccaggcgtactccatcccttcacgactggtccagacgtttttgcaggttacggagcaggtgtgacagccgatgcatttatcgagattcagcaccatgccgacttgtgaacgaattttcattttacgctctcctgtacctggtcattaccttcgccgtctaaccagttaatgttcttcatcttacgtaccacaacaaactcatcgcggttggaaccgacggtgccatagtagttaaagccgtacgccaggtggccgtagccgccgatcatatgggtcggttttggcgtaatacgggtaaccgagttgtggatccccccgcgctgaccggtaacttcagaacccggcaggttaacgatacgttcctgcgcgtggtacatcatggtcattcctgccggtacgcgctggctcactaccgcacgcgccgtcagggcgccgttggcgttgaagacttcgatccagtcgttatcctcgatacccagatctttcgcatccgcttcgctcatccagacgatcggcccgccgcgcgacagagtcagcatcagcaggttatcgctataagtagagtgaatcccccacttctggtgcggcgtcaggaagttcagcgccttctccttattgccgttggacttctcgcccatcaccgctttcaccgaacgggtgtcaatcggcggacgatagaccagcaggctttcgccaaagtcgcgcatccactggtgatcctgatacagcgactgacggccggacagcgtacgccacggtatcagctcgtggacgttggtgtagccagcgttataggagacatgttcgtcttccaggccagaccaggtcgggctggagatgatcttacgcggctgcgcctgaatatcgcggaagcggatcttctcgtcttctttgttcagcgccagatgcgcatggtcgcggccggtaaattcgctcagcgctttccacgccttcacggctacctgaccgttagtttccggcgccagggtgaggatcatctcagcggcgtcaatagcggtctccagcttcggctggcctttcgccgggccttccgccttggtgtagttgagcttacgcagcaggtccatctcgctctgggtattccaggcgatacctttaccgccgttgccgatggtttccagcagcgggccgatagaggtgaaacgctcgtaggtcgccggataatcacgctcgaccggaataatatgcggcgcggttttacctgggatcaggtcacattcgccttttttccagtctttaacgtcaaacggctgcgccatttccgcggcggaatcgtgctgaatcggcagcgtcacgacgtcggtttctttgccgaggtggcctacgcagacttcagagaatttcttagcgatgcctttatagatgtcccagtcgcttttggattcccaggccgggtcaacggcggcagacagcgggtgaataaacggatgcatatccgaggtattcatatcgtctttttcgtaccaggttgcggtcggcagtacgatgtcggagtacagacaggtgctcgacagacggaagtcgagcgtgacgaccagatccagtttgccgtcaagaccgttatcccgccactcgacttcttccggcttcacgccgccctgcttgccaaggtccttgccctgaataccgttctcggtacccagcaggtacttgagcatatattcatggcctttaccggaggagcccagcaggttggaacgccagataaacaggttacgcggatggtttttaccgttctccggctgctcggccgcaaagcgaatagacccctctttcagcgatttcacggtgtaatcgaccggcgtcatgccggctttcttcgcttcgtcagcaatacgcagcgggttcacgcccagctgcggcgccgacggcagccagcccatacgctcagcgcgcacgttgaagtcgatcagatgtccgctatagcgggatttatccgccatcggcgacagcagttcctgcgcggtgacggtttcatagcgccactggctggagtggttatagaagtacgatgtactgttcatgtggcgtgccggacgctgccagtcaaggccgaacgccagcggctgccagccggtctgcggacgcagtttttcctgaccaacgtagtgcgcccaaccgccgccgctctggccaacgcagccgcagaagatcagcatgttgatcagaccgcggtagttcatgtccagatggaaccagtggttcaggcccgcaccgacgataatcatcgagcggccatgggtcttatcggcgttatcggcaaattcgcgcgcggtacggatgatgtgcgcgcgggatacgccggtgattttttctgcccaggctggagtgtacgccttgacgtcatcgtagctggtcgcgcagttttcatcgttcagaccgcgttccaggccgtagttcgccatggtcaggtcgtaaacggtagtcaccagcgcggtggaaccatcggccatctgcaggcgttttaccggcagtttgtgcagcagaatgttttcgaggtcgactttgttgaaatgctcggaaccttcgccgccaaagtatgggaaaccgacgttggcgatatcatcatggctgccaagcaggctaaggcgcagctcaatttcttcgccggttttaccatcgcgctgttcgaggttccacttgcctttgtcgccccagcggaaacccagagaaccgttaggtacggtcatttcgcccttctcgtcaaaggcgacggttttccattccggattctgctcctggcccagggagtcaaccaggtcggcagcgcgcagcatacggccagcggcatagtagccgtcgcgctcttcgagcatgaccagcatcggcatgtcggtgtagcgacgtacgtaatcggtgaagtactggctcggtttatcgaggtggaactcacgcagcatgacgtggcccatcgccagcgccatcgcggcatcggtaccctgcttcggcgccagccacagatcgcagagcttggcgatttcggcatagtccggagtaatcgccacggttttggtccctttgtagcgaacttcggtaaagaagtgcgcgtccggggtacgggtctgcgggacgttggagccccaggcgatgatgtagctggagttataccagtcggcagattccggcacatcggtctgttcgccccaggtcatcggcgaggctggcggcaggtcgcagtaccagtcgtagaagctcagacaggtaccgccaatcagcgacaggtaacgggcgccggacgcataggaaaccatcgacatcgccgggatcggcgagaagcctgccacgcggtctggaccgtaagttttgacggtatagacgtttgaagcggcaatcagttcgttcacttctttccatgaagaacgaacaaaaccgccgcgaccgcgggcctgtttaaagcttttcgctttatcggcatcttcaataattgaagcccatgcctcaaccggatcgctatgctgaactttcgcttcacgccacatcttcatcagacgcttacgcatcagcggatatttcaggcggttagcgctgtacagataccaggagtagctggcgccgcgcgggcagccgcgtggttcatggttcggcagatcggggcgggtacgcgggtaatcagtttgctgagtttcccaggtgaccaggccatttttgacataaattttccagctgcatgagccggtgcagttcacaccgtgagtggaacgcacgattttgtcatgctgccaacgctggcggtatccatcctcccaatcccggttggttttaagaagctggccgtgcccatcggcaaaggtttcacccttctgtttgaagtagcgaaaccggtccagaaatttactcatcgggtttctcctgatatggagcctgacggctctctgataaatcgacattgctggatttgcagcgaaaatagcgccatgccggaagaggagaattgatggcgatcaatgcgaaatagcttataaatccgcacccaacccacagataccaccaaagtagtaacgatatttattaaatatccaattgttttataaggattattttaaatatgacagaatgttaaccgggatttatgccacgcttaggtattaagtggtagatgacgtaccgatagttatttccctgaattcaacagctttgcacaagtaaaagtatgttgtaactaacaacaaataataaaaagggcgcaccctttggcgcgccctgtcacttcacattaagaaaagacttatttctgtttacggccgtataccgcccaggtgattactacgcaggcaatatagaaaacgaggaagactttcattgccccggccggcgagccggtcagatccagcgaaataccgaacgctttcggaataaagaaaccaccgatcgcgccaatcgccgaaataaagcccaacaccgcggcggtatccgtcgccgcttcacgcatcgcttgcgcttcgctgccgccctgcgctttcacgcggtccatcgtaagcttgcggaagatcacggaaatcatctggaaggtagaggcgctgcccagcccggcggtcaggaacagcaccataaataccgcgaagaaggcgatgaagttgccgccctgaccatttgtcggcagagtcaggaacagtaacgcgcagaaaatagccatcaccacgaagttcaccagcgtcacgcgggtcccgccgagacggtcggaaatcgccccgcccatcgaacgcgccagcgcgccaataaacggaccgaagaaggcgtagtgcaggatctgcacgtccgggaactgggtttttgacagcatcgcaaacccggcggagaaaccgataaaggaaccaaaggtcgccagatacagcagcgccataatccacagatgcaggcgtttaagtaccggcaactgttcgctcagcgatgcttttgaggccgacaggtcgttcataaagaaccacgcggccagggtaaagatgatcaggaatggaacccaaatccacgcggcgttttccagatacagcattgagccatccggctgctcgctaccgctaccgccaaaaacggcaaaaatagaaatcgagaccaccagcggcgcaaccagctgcatcacgctgacgcccatgttaccaaggccgccgttaacccccagcgcgccgccctgcttttctttcgggaagaagaagctgatgttcgccatactggaagcaaagttagcgccggcaaagccgcacagcagagagataatcacgaacacgctaaacggcgtggaagtatcctgtaccgcaaagcccagccaaacgcacggaataatcatgataccggtactgaacgccgtccagcggcggccgccgaacagcgggaccataaaggcataaggtacgcgcagcagcgcgccggaaagcgctggcaatgcggtcaacataaacagctgatcggtagtgaactgaaaacccactttattgaggtttaccgcgacggcgctaaacaacatccagacgcagaacgccagtaaaagacagggaacggagatccataaattgcggctcgccacacggtggccgcgctgttgccaaaactcaggatcttcaggacgccagtcggtgatgactgagctgctagccttctccgggattgaagattgactcatagatacctctgattattcatatttcctgatgctaccttaggggttgctcaaggctgtaagttgatataaatcaaaggaaaagcgcgggccattttgtacaaaaataaatcatgctccgaaatgagtagataattatgagaaaaaaagtgtggtttttcacgcgactgctgggttcgtggttatccctcccaccacggcacctaccaccgacaattaaggggtaatcccttaggggtatgggtatactccaggggatagtcgagaataagcgccactcccggagagatgacccatcaggagccacccattccatgttaaaacgtttgtttacgccgctcacattggttaatcagctggcgttaatcgtactgctcgccaccattattggcgtggccggtatggcgatatccgcccgcctggtgcatggagtgcagggcagcgcccacgccattaacaaggcaggctcgttgcgtatgcagagttaccgactgctggcggctattccgctgacggccaacgatcaaaagctgtttaacgatatgaccgctaccgttttcagcccggagttgcaatactccgcgcgtcgtgacggccaggaagtacagctgaaagcgctgcagcaatattggcagttgtcgctgggaccgggcatgaaacaggccgtcaggcaaagcgacgtggcacaggatgtcgccgactttgtcgaccgtattgaccagttggttaccgctttcgaccacaccaccgaacagcgtatcgagcgcgtggtctggatccaccgcatcctcgccatcggcatggcgctgctgctgatctttaccattatctggctgcgcgcccgcctgctgcggccatggaaacagttactgggtatggcgcgggcggtcagccagcgcgattttacccagcgcgcgcacatcagcggtcgcaacgaaatggcgaccctcggcatggcgttgaataacatgtcggaagagctggcggaaagctacgccgtgcttgaacggcgggtacaggaaaagaccgccggcctcgagcagaaaaacgagatcctggcctttttatggcaggccaaccgtcggttacactccagcgccccgctgtgcgagcgcatctcaccggtgctgaacggtctgcaggggctgacgctgttacgagatattgaagtgcgggtgtatgacctcgaggatgaagacaatcatcaggagtttgcctgccactccgatatcgaatgcgatgataaaggctgctatctatgtccgcgcgatcttcccccgctgccggatggcggcacaacgctgaaatggcgactatcagacgcgcataaccagtatggcatcctgctggccacgctgccggttggccgccacctgagccacgaccaacagcaactggtcgacacgctggtggagcagttgaccagcaccctggcgctggatcgccatcaggaaaaacagcagcagctcatcgtgatggaagaacgcgccaccatcgcccgcgagcttcacgactctatcgcccagtcgctctcgtgcatgaagatgcaggtgagctgtctgcagatgcagggcgatagcctgccggatgaaagccggctgctgttggggcagatccgcaacgaactcaatacctcatgggcgcagctaagggagctgttaaccaccttccgcctgcagcttaccgaggcgggtctgcgcccggcgctggaggccagttgtcaggagtacagcgcgcactttggtttcacggtacaactggattatcagttgccgccgcgttttgtcccgtcgcatcaggcgattcacctgctgcagatcgcccgcgaggcgttaagcaatgcgttgaagcatgctaacgcgacagaagtcatcgtgaccgtgtcacaacgcgataatcaggtacgtttagtcgttgccgataacggccgcggcgtaccggaaaacgcggagcgaagtaaccattacggtttaattattatgcgggatcgcgcgcaaagcttgcgcggcgactgtcaggtgcgccgccgggagaccggcggtaccgaagtcgtggtgacatttatcccggaaaaatcgttttcaatccaataaggagacccctatgagtcaacaggaacgggcaaccatccttctcattgatgatcatcccatgctgcgcactggcgtaaagcaactggttagcatggcgccggacattcaggttatcggcgaagccagtaatggcgaacaaggtatcgaactggcggaatcgctggatccggacctgattctactggaccttaatatgccagggatgaacggcctcgaaacgctcgacaagctgcgggaaaaatcgctctccggccgcgtggtggtatgcagcgtctccaatcatgaagaggacgtagtgaccgccctgaaacgcggcgccgacggctacctgctgaaagatatggaaccagaagatctgctgaaagcgctgcagcaggccgctgcaggcgaaatggtattaagcgaagcgttaaccccggtactggccgccagcctgcgcgctaatcgtgcaacgtccgaccgcgacatcagccagttgaccccgcgcgagcgtgatattctgaagctgattgcccagggcctgccgaacaaaatgattgcccgccgcctggatatcaccgaaagcaccgttaaagtgcatgtgaaacacatgctgaagaaaatgaagctgaaatcacgggttgaagccgccgtctgggttcaccaggaacggatcttctaaggcgattccgtccaggaaacgtcgggagccgtaaacgtcaccagcggctcggtcagcgccagtgcgatctcattggaagagacgcgctgacccgatttatcttcaaccaccaccgacagacgccagcgattcaccgcgcccggctcgctgttccacaccggcataatgatgctccagccatccgcactgttggcattaaccggcggcgtcaggcttagcgcctgagtgtccccctgccaatgcagcgatttaatgccgtgcaggctattaatttgcaacttcagctgtaccgtttcgccggagtgcagatcccacggcggagtcgccagatagaccgtcagattcttacgctgtcgatactccactaccggcagattatcgcgttccgggctatcgtagcggctgccgcgtagcgagttgctgatagccacttcatccgccgccagttgctgtttcagcggaaccccaaaacgataattcagcttcaggccgacattattctggctgacgccattttcaccctgtttgtgtttagcggtgaccgtcaccaacggtaccggggtgtaattcagtcccaccgaaaccgccaccggattatggtatccggtaccggaatgaaacagatcgacgctatcgccgaagtactgttcgacgctgacgctggtattgatgtgctgataaaacggcaatcgtgcctgggcagtcacgtcatacccgacggccatccgctgctcctgggtctgattttcccgcaactgccagtcgccaagtgggtggtaatagttggccgataagcgcaaatactcgccccaggcttccgcgccgatgctgccgcgcgccaggctctcgctgagcactttgtcgtaaaacgagttataacccagcagccagctaccgacacgccagcgctggcccagcccaacattgccaaccagatcgttctcgcgccgggtaaccgaatattgattccaggtgaggtaacgctcattgtcctgcagcggcacaaaccagctacccttgctaccggtgaagttaccctctttatccaccaacaggtcgatattggcattaccccacggcgacagccagttttccagttgatggctgaactcattgccgattttgctgatggcgaacatccgcgcctgctcgccggtggtgagtccgttatcgctcatgctggcttcgccgaatttcttggccatctcggcgaaatgtttggcatcgtcgtcgacctgcggcgctatgcctaaatcgggcagcgtcgtttgcggcggcatactgctatcgttggcaatcagcgcccaggcgggagcgcctgtcagcagcaggagaagcgtcagtgatggggttaagcggtacggcaaaggcatcaaacggattaacgtaagctcacggggaataacaacatcacgttagtttatcgttttttgcccttccccgcagccctgtgggccattccaggaataaactgaaaccggttgacgtttgctgtccccgatcatcaaaccggcgttcgggtttgatttgccgccagcagcgctttgagttccggaatacaggaaccacagttggtgccacacttgagcttcgcgccaagcgcctctacgctgacgcagccgccggcaatagcctcgccgatctgccgctcgccgatactaaagcaactacagatagtctgcccacgcggcgcgctgtcgccacccttacggccgctgagcaacgcatggcgtaggccggcggtctgctgcggcgtccgaaacgccgtatacagccattcagcatcgatttgcggcggcttaatatcgctccagcagccgagcatcaattgcccgtcgtgccaggccagtaggttccacagcccgccgccctcggcaatttgcaactgccatccctgcttgcgacaccactcggtcagccagctttgcgggccggtatccgcggccagcgacaaatggctaagccctaccaccgcccgtcgccgccagtgcagcgaggatggcaacggtaagggctcgcgagataatagctccccttgccacgccggccgccacggcgctatcgccaccgccgactgcttgctctccggctgcccggaatgcggatcggtgaccgccgccagtaaattattgacccgtccctggcgggcaaactgattattccagtgcatcggcacaaagagcgaaccggcgcgctgcccttcgctgactatcaccttcgcaatcatcacgccgtggcgcgaccagacgcgagccagttctccctcacgtaattgtaagcgacgcgcatcggcaggcgccacctcgacgaccggttcggcaatgtgctgcatcaaccgcggtatgtcgccggtgcgggtcatggtatgccactgatcgcgaatacgtccgctattgaggattaatggataaaatgcctcggtctgcgcccgggtcggctgcggcgacaccggcaccatccgcaacctgccgtcgccgtgccagccctccgttaaccgccagggcgcggcgctgcggctcaccggccagcgcaccggcgtcagggcatcccacgcctcccggctgaggtccgccagcccgccaatatcaaacgcccgctgaccgtcattttcaaaccctgagagcgccgcgtgttcacaaaatacctcatgcggatgttgccatgaaaaagctcgggcataacctaattcggcggcgagacgggaaatgatccaccagtcggctttcgcctcccccggcggcggcaaaaaagcccgctgacgcgaaattcgccgctccgagttggtcacggtaccgtttttttcgccccatgccagcgccggaaagcggatatgggcaaagcgccccgtatcagtattggcggcgacatcggagaccatcaccagcggacacctggacagcgcctgactcaccgcgtggctatcgggcagtgagaccaccggattggtccccataatccacaccgctttgacctcgccgcgtccaatcgcggcgaagagttcgacggcggttagtcccggcgtctgcgccagtcgctcgctgccccaaaagcgcgctaatcgctgcaggtcctgcggctcaaaattcatatgcgccgccagcatcgtcgccagcccccccacttcacgcccgcccatggcgttgggttgaccggtcagcgaaaacggcccgcagccgcggcgggcaaacttcccgctggcaagatggacattgataatcgcgttgcacttatcgctgccgctggcggactgattaattcccatggtgtacagcgtgatggcgcgcggtgcagcgataaaatcacgataaaagcgagccacttgctccggcgccaggccgcagaaagcggccgctttttccacgctccactgcgcggcgatggtcagcgcctgccgctggtcgcgaaaacccgccaccattccaccgctggcggcaatggcatttagcaggccgacaaatagcccgccatcgctaccgggcgccaacgccagatgatcgtcggcaatatcacaggtcgcggtgcgtcgcggatccaccaccacgatccgcaaccgcggattatcgcgtttcgcctgcaccaaccgctgatagagaaccggatgcgcccaggcggcgttggagcccaccagcaccaccagatcgctctgctcgacatcttcatagctgcacggcacgacgtccgcgccgagcgcccgcttatagccggtgaccgccgatgacatacataaccgcgaattcgtatcgatattggcggcgccgataaagcccttcatcaacttgttggcggcgtaataatcctcagttaacagctgaccggaagcgtaaaacgcgaccgcctgcgggccgtagcgctcaataatgtcgcgcagacgtgaacccgcctccgccagcgcctgcggccagccgaccgcccggccatcgacttcagggtgtaataaccgcccgctaagcgaggtcgtttccccaagcgctgccccttttacgcacaagcggccaaagttagcgggatggttttcatcgccgcgaaccgtgacggttccactgggttcaacgcgggcgataactccgcagccgacgccgcagtatggacaggtggttcgggtttcgctcatcagctcgcctccgcgcgcagcagcaatgcctggttgccgacccacactttgccctgttcgatcttcaccggccacgcgcgcaccaacggctcgccgctgtcgtacaagcgaccatctcgcaagcgaatccgctgtttatacagcggcgaaataacgatcggctcgccgcccgcgtcgcctaaaatgccgcgcgataacacgttggcctcgctgccgggttcctggttatccagcgcgtaaacttgctcgccgaagcggaacagcgcaatctgccgctcgccgaggcgcgcgccgatccccgcctgcggcgggatcgcgtccagatcgcagatcgcctgccacggccgcgacggcagggccggttgcccaagcccttgcggcgccaccagctgcggctgaccgcgcaggatatgccgctgcaccgcctcatcggcctcatcgctgttaacgtaggaacgaaatagcgccagccgctgtgggtcgttcagggtggtctgccattcgcactggtagctatccaccacccgcgccatctcctgctccagctcatcgccgataccgagactatcgtgcaagatcacctcgcgtagatacgccacgccgccttcaaggttatccatccagctactggtgcgctgcaggcggtcggcggtgcgaatataaaacatcaacaaccgatcgacggtacggattaggctggcgtcatcaaggtcactcgcaaagaggtccgcatggcgcggtttcatcccgccgttgccgcagacgtaaagattccagcccttttcagtcgcaataaccccgatgtctttaccttgcgcttcggcacattcgcgggtacagcccgagaccgccattttgattttgtgcggcgcgcgcagccccttgtaacgatgttcaagccttaccgccagccccgttgaatcctgaaccccatagcggcaccaggtcgagccgacgcaggattttaccgtgcgtaatgatttgccgtaggcgtgtccggtttcaaatcccgccgccgccagctcgcgccagatgtccggcagttgctccagccgcgcgccaaacaggtcgatacgctgtcctccggtcactttactgtacagctggtaacgtttggcgatctggccgatagcgataagcccatccggtgtcacttcgcctgcggccatccgcggcaccaccgagtaagtgccgtctttctgaatattggcgaagtagcgatcgttggtgtcctgcagcggcaaatgcgccggtttcagcagatactcattccagcaggaggccagtaccgacgccaccagcggtttacacacttcacagccgtggccctgcccgtaacggctaatgagctgatcgaaggtatggatgtggttgactcgtaccagatgatagatctcctgccgcgaccacggaaaatgctcgcagatatcttttttaacctcgacgccctgcccggtaagctggtgttccatcacctgtttgaccagcgcgctacagcctccgcagccggtcgccgctttagtgcagctttttatcgccgccatatcgcccgctccggcgctgaccgcctggcaaatgtctcccttactgacgttatggcaagagcaaatctgcgcgctatccggcagcgccgccacccccagcgctttcgtcgtggccccatccatggccgggaggatcagactttccggacgagacggtagcgccatgccgttcagcatcatctgcaacagcgtcgcgtagtcaccggcatcgcccaccaatacgccgcccagcagcgttttgccatcagcgctgacaacgatctttttgtagatctgccgcggaccatcggtccattgatagctctggcaaccagctgtacgtccgtgagcatcgccaaacgacgctacatccacgccgagcagtttgagtttggtgctcatatcggcgccgctaaagcgggcggtttcgccggccaactgcgccgccgcggtgcgcgccatgtggtagcccggcgccaccaggccataaattttgttgtcccacagcgcgcattcgccaatcgccaatatatctgcgtccgaggtccggcagtggtcatcgataccgataccgccgcgttcgccgattgccaggcctgcgccgcgcgccagcgcatcctgcgggcggatcccggcggaaaagaccaccatatcggtctgcagcgtgccgccatcggcgaagttaagctgcagcccgtcggcggtgcgcactatcgccgttgtcgctttgctggtgtgcacgccaacctctagatcgagaattttctcccgcagcatcgccgcgccgccgttatccagctgcaccgccatcagattggcggcgaactccaccacatgggtcttaagccctaactgttttaacgcgttggcggcttccagccccaacagcccgcctccgatgaccaccccgctctgcgcagtggcggcgcgggcggcaatgcggtcaagatcgtcaagcgtacgatagacgaagcagccttcttcatcgttaccggggattggcggcacgaagggataggagccggtcgccagcaccagcttatcccaatgggtttcatggccgtgggcatcgcgcacgattcgcgccggacgatcgatttccgcgatcgtctctcctggccgcagctcaatcccgtactggctaaaaaagtctccctctaccagcgatagcgactctgcgctgcgcccggcgaaatattccgagagatgaacccggtcataggcggcatagcgctcttcgccaaagaccacgatacggtactgctggtgcaggttccggctcacgcattgctcaagaaaatggtggccgaccataccgtgtccgaccagcactaatacaggtttagtcatcgtcatttttcctgcagcccgcggctgcgttatagaagggtcaaaaagccactccgctgaaggagacctatcgctgccgagctgcgcggtaagcggcgccgcctgctggcagtcgcccagcagcagcacgccgtgcaaccggccatcgcggatcagcaggcgacggtagtggcgatcgatggggtcccaactgctgtagatctggtcctgctcgccggcccgctgttcgccggcgctaaaaaactcgataccggtgaccttcagccgggtgccgctgtcctgccagctgaattcttcgccgggagccccgcacaggcgttcaactaacacatcggcctggcgcaagcagggagccaccagcccccaggtttggccgtcaatctcacaacactcgccgatagcgctgatccccggcagcgaggtcgccatccggcggtcgacgataatcccccgctggcaggctacgccgctgcgcgccgccagacggatatccggccgcactccggtggccaacaccacccggctggcggcaaaagcgcgcccgtcctccagccgcacatgctgctcgtcaatagcggcaattcggctctccaactcgcagtggatgccgcgtgcctcaagctgttgttttaactgttccgcggcaaaagcatcggtaagcggctccatcaaaccgctaccgcgatggagtagcgtcacttccccaccgtgacggcgcagcgccgccgcgacctccacgcccaatacgccaccgccgattaccaccgccgggccggggattgccaggatgtctttaacatccgccagggtgcgaaaggcgaatacctgcgggcgctcaatacccggcagcgacgggataaacggctgcgacccggtggcgaacaccagttcatcccattccagccagacgccgccgacgcgtagcctccgccccgcgacatccacttcgctgaccgcctcgccaagccgcacgcggacaccatgctgggcgtaccactccgtcggcagcagttggatttgcgccgccgttttttccccgccgagtaccggcgagagctgaatgcggttgtaggccggctgcggttcatcgccgataagcgtgatgatgaaacgcccctgcgcgcgcgccgccagcttctctgccagccgggttgccgccataccgttgccgataattaccagtcgccgcatcattccgccttaggccgctttcggctgcttttcgtagaggaaatggaggatctgctgacgcaggtggtggtagtggttatcttccgccagctggacccggttacgcggacgcggcagattaacgtcaaggatctcgccgatcgtcgcggccggtccattggtcatcattaacacccggtcggaaagcagcaccgcttcatcgacgtcgtgggtgatcacgacaatggtggtgttcagttcctgctggatgtgcattaccgcgtcctgcagatgggctcgggtgagcgcgtccagcgcgccaaaaggctcatcaagcagtaacacttttggcttcatcgccagcgcgcgcgcgatgccaacccgctgtttcataccgccggagatctcccccggccgtttgtgcagcgcgtgccccatctgtactcgctgtaaattgtgttcgatccactcccggcgctctgccttgctcatggtgcggcgaaacacctgatccaccgccagcgccacgttgtcaaaacagctcagccatggcagcagcgaatggttctggaacaccaccgcccgctccggtcccgggccggaaatttcacggttatcgcatagcagcccgccctcagtgggctgggtaatcccggcgatcagattcaatagcgtggatttgccgcatccggagtggccaatcaggctgatggtttccccttcgtgaatatcaaaagagacgttttgcagcgccaggaactcgccgctggcggtgttaaagcgttgactgacggcctgtacctgaattaatggtttcatagcgactccttatttttcctgccagctgaagcggcgggcgagcaatatgagcccctgttctagcagcaggccgacaacgccgataatgacgatggcgatgatgatgttttccacattgaggttgttccattcattccagatccaaaacccgatacccaacccgccggtcagcatctcggcggcgacgatcaccagccaggcaatgcctatcgacagccgcacgccggttaataccgcgggcagcactgccggaaagaggattttgcgcatcaccgtccattccgacagctgcagcacgcgagccacattgagatagtcctgcgggatacgcctgacgccttccgcggtgttaatgaccatcggccagatagagcagataaaaatggtccagctggaagccggttccgccttctggaacagcagcaggccaatcggtaaccacgccagcggactcaccgggcgcagcagcgcgatgagcgggttaaacattcgcgcaaagaacagcgagcggccgataagaaagcccagcggaataccggccagcgccgctaaaccaaagcccaccgcgacccgctgtagcgaagccaacacgttccagccgatgcccatatcgttcggtccgtcgcggtagaaggggtcggaaaacagcgtcagcgccgaatccagagtgctcaacggcgtcgggaagcctttcgcgccaatcgccgccagctgccagccgagcagcagcagagccaggcccagcagcggcggcagtagacgctgcagcgcggcgttcagccagcacctggcggacggcgtagctttgcgcacctgcagcggcggcaggacaatgatttcgcccggcgcggttgaggtctgcgcgcgcggctgcgtgttaatggctggtttcatctcatgcccccttatgttgaatggcgaaactggcggcatacccttccgggtcgacgccgttccacactttgccgtccagcagcgtgctgctgcgtaaagtttgcgttggcgcagtgatgccgcccacggcctgcgccgcctctttccacaggtcgatgcggttgatacgctgcgctaccgcctgataatccggcgcgcttttcagcaggccccagcggcggaattgggttaagaaccacatgccgtcggagagccacggataactggcttccccctgctggaagaagcgcatgggatgagcgtcgcgccagcgtttgccgatgccattgtcgtattcgccaagcatgcgcccgctaaggtactgttctttggtgttgagccacgcccgtctggcgaggatccgcgcggtttcgcgggtgttgtcggcagacgcttcaatccagcgctgggcctccagcagcgccgccaccagcgcccttgcggtatttggatagcgcgccacccaatcgctgcgcgcgccgaggattttttccggatgatccgcccagatctgctggctggttgccgccgtaaagccgatgcgatcgttgatcgcccgcgcgttccacggttcgccgacgcagaagccgaccatattgccgatgcgcatgttcatcaccatttgcggcggcggcacgaccaccgtgcgcacatcggcgaaggggtcgataccggcgttcgccagccagtaatagagccacatcgcatgggtgccggtaggaaaggtgtgggcgaaggtgtagctgcccggcgctttttggtcgatcagccgcttgagcccatgaccatcgcttacgccttgcgcctgtaggtcactagagagggtgatcgcctgaccgttgcggttcagggtcatcaggttggccatctgctgcggtttgccggcaataccaagctcaaggccatacagcatgccgtagaggatatgcgctgcatcgagttcgccgg

(The sequence listing continues in the following parts.)
